(19) United States
(12) Patent Application Publication
(10) Pub. No.: US 2016/0067347 A1
(43) Pub. Date: Mar. 10, 2016

(54) APJ RECEPTOR AGONISTS AND USES THEREOF

(71) Applicant: AMGEN INC., Thousand Oaks, CA (US)

(72) Inventors: Jerry Ryan HOLDER, Simi Valley, CA (US); Gayathri SWAMINATH, Brisbane, CA (US); Leslie P. MIRANDA, Thousand Oaks, CA (US); Jennifer ARAL, Newbury Park, CA (US); Elizabeth M. DOHERTY, Thousand Oaks, CA (US); Thomas NIXEY, Newbury Park, CA (US)

(73) Assignee: AMGEN INC., Thousand Oaks, CA (US)

(21) Appl. No.: 14/654,501

(22) PCT Filed: Dec. 17, 2013
(86) PCT No.: PCT/US13/75773

§ 371 Date: Jun. 19, 2015

Related U.S. Application Data
(60) Provisional application No. 61/779,985, filed on Mar. 13, 2013.
(60) Provisional application No. 61/740,409, filed on Dec. 20, 2012.

(51) Int. Cl. A61K 47/48; A61K 38/08; C07K 7/08; A61K 38/10

(52) U.S. Cl. CPC A61K 47/48215; A61K 38/10; A61K 38/08; A61K 47/48415; C07K 7/08

(57) ABSTRACT

The application is directed to APJ receptor agonist analogs having increased stability relative to the wild type apelin-13 and methods of using the agonist analogs. The analogs can be used, inter alia, in cardiac disorders such as heart failure.

### CROSS-REFERENCE TO RELATED APPLICATIONS

[0001] This application is an international PCT Application which claims the benefit of U.S. Provisional Application No. 61/740,409, filed on Dec. 20, 2012 and U.S. Provisional Application No. 61/779,985, filed on Mar. 13, 2013. Each of these applications is hereby incorporated by reference in its entirety.

### SEQUENCE LISTING

[0002] The instant application contains a sequence listing which is being submitted herewith in ASCII format via EFS-Web and is incorporated herein by reference in its entirety. The Sequence Listing, created on Dec. 17, 2013, is provided as a file entitled A-1716-WO-PCT_Seq_List.txt and is 1,045,666 bytes in size.

### FIELD OF THE INVENTION

[0003] The application relates to agonists of the APJ receptor that have increased stability, circulating half life and/or potency relative to native apelin.

### BACKGROUND

[0004] Apelin is the endogenous ligand for APJ (APLNR, angiotensin receptor like-1). The APJ receptor is a member of the rhodopsin-like G protein-coupled receptor (GPCR) family. The apelin/APJ system has been observed in many tissues such as heart, kidney, pancreas, lung and the central nervous system. This suggests diverse roles of the system in the physiology and pathology of mammals.

[0005] Apelin peptides are processed from a 77 residue pre-pro form into smaller bioactive fragments, mainly a 36 residue form (Apelin 42-77—also referred to as Apelin-36) and a smaller 13 residue polypeptide (Apelin 65-77—also referred to as Apelin-13) Hosoya et al., J. Biol. Chem. 275:21061-21067, 2000. Apelin peptides were previously determined to be endogenous ligands for the orphan APJ receptor, a member of the seven transmembrane G-protein-coupled receptor superfamily. Tatemoto et al., Biochem. Biophysi. Res. Commun 251:471-476, 1998. One of the shorter more active isoforms identified, pyroglutamated apelin-13 ([PE65]Apelin-13 (65-77), has been reported to be the most potent and abundant form of apelin in cardiac tissue. Maguire et al., Hypertension 54:598-604, 2009. In vitro and preclinical models have suggested that the apelin/APJ system has a role in cardiovascular homeostasis as well as metabolism. Barnes et al., Heart 96:1011-1016, 2010. Circulating apelin levels are transient and Apelin-13 has a brief plasma half-life of <5 minutes leading to short-lived cardiovascular effects.

[0006] In vitro, exogenous apelin increases contractility at subnanomolar concentrations in atrial strips and whole rat hearts, and increases sarcomere shortening by up to 140% in isolated cardiomyocyctes. Barnes et al., Heart 96:1011-1016, 2010. Apelin also has a potent inotropic effect in an ex-vivo isolated heart assay. In vivo, acute apelin infusion restores ejection fraction, increases cardiac output and reduces left ventricular end-diastolic pressure in rats with chronic heart failure. Berry et al., Circulation 110:187-193, 2004. Exogenous apelin potently enhances myocardial contractility without inducing left ventricular hypertrophy concomitant with reduction in ventricular preload and afterload. Barnes et al., Heart 96:1011-1016, 2010.

[0007] There have been very limited structure activity relationship (SAR) studies reported for apelin peptides. The limited SAR studies have focused on in vitro affinity and/or potency enhancement. There are no reports with SAR focused on increasing proteolytic stability and prolonging circulating half-lives while improving or maintaining potency of APJ agonists.

[0008] Studies from Kawamata et al and Hosoya et al have shown that that shorter peptide apelin-13 had approximately a 3.5-fold higher in vitro affinity to the APJ receptor than apelin-36. Kawamata et al., BBA 1538: 162-171, 2001, Hosoya et al., JBC 275: 21061-21067. Apelin-13 analogues were reported having a single substitution with either canonical or non-canonical amino acids. The authors also reported double and triple substitutions in apelin 66-77 and apelin 63-77, but not in apelin-13. The emphasis was on peptides reported to have higher in vitro affinity and potency than aplein-13. Nishizawa et al., in: T. Shioiri (ed.), Peptide Science 2000: Proceedings of the 37^{th} Japanese Peptide Symposium, pp. 151-154. Several if not all of these modified peptides are reported in later studies. U.S. Pat. No. 7,635,751.

[0009] In a 2003 study (Medhurst et al., J. Neurochemistry 84:1162-1172, 2003) in vitro activity of apelin-36, apelin-17 and apelin-13 was compared. It was concluded that all three peptides were approximately equipotent. C-terminal amidation resulted in about a 14-fold decrease in affinity. A more recent study (Hamada et al., J. Mol. Med. 22:547-552, 2008) reported cyclic analogues of apelin-13. When tested for in vitro activity all three analogues maintained function activity, although with reduced potency relative to apelin-13.

[0010] A 12 amino acid-apelin peptide having ligand activity on APJ was reported in a 2009 patent (U.S. Pat. No. 7,635,751). The peptide could have a substitution of one non-canonical amino acid.

[0011] Another study reported synthesizing analogues of apelin-13 with amino acid substitutions with non-canonical amino acids at the C-terminal end of the molecule emphasized, but no pegylation at the N- or C-terminus or another site specific location. The use of internal PEG spacers (short PEG (n=4 or 6), however, was also reported in lower activity peptide analogs with deletions in the middle of the sequence that contained fewer amino acid residues than apelin-13. Murza et al. Chem Med Chem 7:318-325, 2012. Studies have also reported attempts to modify the apelin receptor in order to affect physiological function. WO 2010/053545. The invention relates generally to compounds which are allosteric modulators the APJ receptor. The allosteric modulators are derived from the intracellular loops and domains of the APJ receptor.

[0012] This application provides novel apelin therapeutic agents and uses of those therapeutics.

### SUMMARY OF THE INVENTION

[0013] Therapeutic agents that have APJ agonist activity are provided. The agonists can have advantageous pharmaceutical characteristics (e.g., half-life or potency). Such compounds can comprise an APJ receptor binding domain or sequences derived thereof by rational design, peptide screening, yeast-based screening, phage display, RNA-peptide screening, or the other screening techniques. The domain can have very little or no antagonist activity. The compound can also comprise a vehicle, such as a polymer (e.g. polyethylene glycol), protein (e.g. an Ab or Fc domain), or another peptide sequence (e.g. a targeting domain) where the vehicle is covalently attached to the APJ agonist domain. The vehicle and the APJ agonist domain may be linked through the N- or C-terminus, or any other site of the polypeptide. The vehicle can be a polymer, e.g. polyethylene glycol (PEG).

[0014] APJ agonist domains can be generated by rational design, yeast secretion screening, rational design, protein structural analysis, phage display, RNA-peptide screening and other techniques known in the art.

[0015] Various embodiments are directed to an APJ agonist having increased stability relative to wild type Apelin-13 (SEQ ID NO: 2), wherein the agonist is modified with at least one non-canonical amino acid. The APJ agonist may also include a half-life prolonging group at the N-terminus, C-terminus, or other residue of the agonist. The APJ agonist can have a half-life prolonging group at the N-terminus, C-terminus, or other residue of the agonist consisting of PEG, an Fc domain, IgG, HSA, PE, an Ab, a peptide, a lipid. cholesterol, a nanostructure or other half-life prolonging moiety known in the art The agonist can be pyroglutamated at the N-terminus and/or can be PEGylated or conjugated at the N-terminus or elsewhere in the agonist. In various embodiments the agonist can bind to the APJ receptor. In other embodiments the APJ agonist is greater than 7, 8, 9, 10, 11, 12 amino acids long, e.g. 13 or more amino acids long and the half-life prolonging group can be anywhere in the molecule. In yet other embodiments, the APJ agonist can have increased potency relative to wild-type apelin-13.

[0016] In various embodiments the APJ agonist can have at least 2 amino acid residues replaced with a non-canonical amino acid. Alternatively, the at least 2 non-canonical amino acid residues can be 3, 4 or 5 amino acid residues.

[0017] In various embodiments the APJ agonist with increased stability has an increased in vitro half-life. The moiety that provides increased stability can be any group that accomplishes this objective, e.g. amino acid substitutions or chemical modifications. In other embodiments the APJ agonist with increased stability has an increased in vivo half-life. The increased in vivo half-life may be a result of increased proteolytic or metabolic stability and/or inclusion of a half-life prolonging moiety. The moiety that provides increased in vivo half-life can be any group that accomplishes this objective, e.g. the APJ agonist can be PEGylated with thiopropionyl(20K-mPEG), Atz(PEG10), NPeg11 or Atz(20K-mPEG) or alternatively conjugated to a protein.

### BRIEF DESCRIPTION OF THE DRAWINGS

[0018] FIG. 1. Examples of non-canonical amino acids

[0019] FIGS. 2A-B. Examples of PEG and linkers.

[0020] FIGS. 3A-C. Examples of APJ agonists.

[0021] FIGS. 4A-B. In vitro stability of APJ agonists in plasma.

[0022] FIG. 5. Agonist activity of 20 kDa PEGylated peptides. The peptides {Thiopropionyl(20K-mPEG)}LRP[hArg][Cha]SHKG[Oic][Nle]P[4-Cl—F]{FreeAcid} (SEQ ID NO: 122), {Thiopropionyl(20K-mPEG)} KFRRQRP [hArg][Cha]SHKG[Oic][Nle]P [4-Cl—F]{FreeAcid} (SEQ ID NO: 123), {Thiopropionyl(20K-mPEG)}LLRP[hArg][Cha]SHKG[Oic][Nle]P[4-Cl—F]{FreeAcid} (SEQ ID NO: 124), {Hydrogen}[Atz(20K-mPEG)]KFRRQRP [hArg][Cha]SHKG[Oic][Nle]P[4-Cl—F]{FreeAcid} (SEQ ID NO: 126) and {Hydrogen}[Atz(20K-mPEG)]LRP[hArg][Cha]SHKG[Oic][Nle]P[4-Cl—F]{FreeAcid} (SEQ ID NO: 127) are potent and act as a full agonist relative to [PE]RPRLSHKGPMPF (pyr apelin-13) (SEQ ID NO: 128).

[0023] FIG. 6. Comparison of a 525 dalton PEGylated peptide (SEQ ID NO: 23) and pyr apelin 13 (SEQ ID NO: 128).

[0024] FIG. 7. Demonstrates intrinsic load independent inotropic effect of an agonist (SEQ ID NO: 24) in an isolated Langendorff rat heart.

[0025] FIG. 8. Demonstrates that an agonist (SEQ ID NO: 24) increases systolic and diastolic function in an isolated Langendorff heart.

[0026] FIG. 9. Effects of a peptide (SEQ ID NO: 23) on cardiac contractility in normal and heart failure rats. MI=heart failure rats.

[0027] FIG. 10. Effects of PEG size on in vitro activity.

[0028] FIG. 11. Effects of peptide valency on in vitro activity.

[0029] FIG. 12. Structures of Bis- and tetrakis-20 kDa PEG peptides.

[0030] FIG. 13. Effects of peptide valency on in vitro activity.

[0031] FIG. 14. Structures of Bis-1.7 and 2.2 kDa PEG peptides.

[0032] FIG. 15. Effects of Fc conjugates for apelin-13 and apelin-17 in rat and human GTPγ assays.

[0033] FIG. 16. Effects of Fc conjugates in human GTPγ assay.

### DETAILED DESCRIPTION

[0034] The foregoing summary is not intended to define every aspect or embodiment of the invention, and additional aspects may be described in other sections. The entire document is intended to be related as a unified disclosure, and it should be understood that all combinations of features described herein may be contemplated, even if the combination of features is not found together in the same sentence, or paragraph, or section of this document.

[0035] In addition to the foregoing, as an additional aspect, all embodiments narrower in scope in any way than the variations defined by specific paragraphs herein can be included in this disclosure. For example, certain aspects are described as a genus, and it should be understood that every member of a genus can be, individually, an embodiment. Also, aspects described as a genus or selecting a member of a genus should be understood to embrace combinations of two or more members of the genus. It should also be understood that while various embodiments in the specification are presented using “comprising” language, under various circumstances, a related embodiment may also be described using “consisting of” or “consisting essentially of” language.

[0036] It will be understood that the descriptions herein are exemplary and explanatory only and are not restrictive of the invention as claimed. In this application, the use of the singular includes the plural unless specifically stated otherwise. In this application, the use of “or” means “and/or” unless stated otherwise. Furthermore, the use of the term “including”, as well as other forms, such as “includes” and “included”, is not limiting. Also, terms such as “element” or “component” encompass both elements and components comprising one unit and elements and components that comprise more than one subunit unless specifically stated otherwise. Also, the use of the term “portion” can include part of a moiety or the entire moiety.

[0037] Unless otherwise defined herein, scientific and technical terms used in connection with the application shall have the meanings that are commonly understood by those of ordinary skill in the art. Further, unless otherwise required by context, singular terms shall include pluralities and plural terms shall include the singular. Thus, as used in this specification and the appended claims, the singular forms “a”, “an” and “the” include plural referents unless the context clearly indicates otherwise. For example, reference to “a protein” includes a plurality of proteins; reference to “a cell” includes populations of a plurality of cells.

[0038] It should also be understood that when describing a range of values, the characteristic being described could be an individual value found within the range. For example, “a pH from about pH 4 to about pH 6,” could be, but is not limited to, pH 4, 4.2, 4.6, 5.1, 5.5, etc. and any value in between such values. Additionally, “a pH from about pH 4 to about pH 6,” should not be construed to mean that the pH in question varies 2 pH units from pH 4 to pH 6, but rather a value may be picked from within a two pH range for the pH of the solution.

[0039] In some embodiments, when the term “about” is used, it means the recited number plus or minus 5%, 10%, 15% or more of that recited number. The actual variation intended is determinable from the context.

[0040] The section headings used herein are for organizational purposes only and are not to be construed as limiting the subject matter described. All documents, or portions of documents, cited in this application, including but not limited to patents, patent applications, articles, books, and treatises, are hereby expressly incorporated by reference in their entirety for any purpose. As utilized in accordance with the disclosure, the following terms, unless otherwise indicated, shall be understood to have the following meanings:

[0041] The term “acidic residue” or “acidic amino acid” should be understood to mean amino acid residues in D- or L-form having sidechains comprising acidic groups. Exemplary acidic residues can include D and E.

[0042] The term “amino acid” or “residue” should be understood to mean a compound containing an amino group (NH₂), a carboxylic acid group (COOH), and any of various side groups, that have the basic formula NH₂CHRCOOH, and that link together by peptide bonds to form proteins. Amino acids may, for example, be acidic, basic, aromatic, polar or derivatized. Non-standard amino acids may be referred to as “non-canonical” amino acids.

[0043] A one-letter abbreviation system is frequently applied to designate the identities of the twenty “canonical” amino acid residues generally incorporated into naturally occurring peptides and proteins (Table 1). Such one-letter abbreviations are entirely interchangeable in meaning with three-letter abbreviations, or non-abbreviated amino acid names. Within the one-letter abbreviation system used herein, an upper case letter indicates a L-amino acid, and a lower case letter indicates a D-amino acid. For example, the abbreviation “R” designates L-arginine and the abbreviation “r” designates D-arginine.

TABLE 1
ONE-LETTER ABBREVIATIONS FOR
THE CANONICAL AMINO ACIDS.
(Three letter abbreviations are in parentheses.)

| | |
|---|---|
| Alanine (Ala) | A |
| Glutamine (Gln) | Q |
| Leucine (Leu) | L |
| Serine (Ser) | S |
| Arginine (Arg) | R |
| Glutamic Acid (Glu) | E |
| Lysine (Lys) | K |
| Threonine (Thr) | T |
| Asparagine (Asn) | N |
| Glycine (Gly) | G |
| Methionine (Met) | M |
| Tryptophan (Trp) | W |
| Aspartic Acid (Asp) | D |
| Histidine (His) | H |
| Phenylalanine (Phe) | F |
| Tyrosine (Tyr) | Y |
| Cysteine (Cys) | C |
| Isoleucine (Ile) | I |
| Proline (Pro) | P |
| Valine (Val) | V |

[0044] An amino acid substitution in an amino acid sequence can be designated herein with a one-letter abbreviation for the amino acid residue in a particular position, followed by the numerical amino acid position relative to a native sequence of interest, which is then followed by the one-letter symbol for the amino acid residue substituted in. For example, “T30D” symbolizes a substitution of a threonine residue by an aspartate residue at amino acid position 30, relative to the native sequence of interest.

[0045] Amino acid residues are commonly categorized according to different chemical and/or physical characteristics. The term “acidic amino acid residue” refers to amino acid residues in D- or L-form having side chains comprising acidic groups. Exemplary acidic residues include aspartic acid and glutamic acid residues. The term “alkyl amino acid residue” refers to amino acid residues in D- or L-form having C₁₋₆alkyl side chains which may be linear, branched, or cyclized, including to the amino acid amine as in proline, wherein the C₁₋₆alkyl is substituted by 0, 1, 2 or 3 substituents selected from C₁₋₄haloalkyl, halo, cyano, nitro, —C(═O)R^{b}, —C(═O)OR^{a}, —C(═O)NR^{a}R^{a}, —C(═NR^{a})NR^{a}R^{a}, —NR^{a}C(═NR^{a})NR^{a}R^{a}, —OR^{a}, —OC(═O)R^{b}, —OC(═O)NR^{a}R^{a}, —OC₂₋₆alkylNR^{a}R^{a}, —OC₂₋₆alkylOR^{a}, —SR^{a}, —S(═O)R^{b}, —S(═O)₂R^{b}, —S(═O)2NR^{a}R^{a}, —NR^{a}R^{a}, —N(R^{a})C(═O)R^{b}, —N(R^{a})C(═O)OR^{b}, —N(R^{a})C(═O)NR^{a}R^{a}, —N(R^{a})C(═NR^{a})NR^{a}R^{a}, —N(R^{a})S(═O)₂R^{b}, —N(R^{a})S(═O)₂NR^{a}R^{a}, —NR^{a}C₂₋₆alkylNR^{a}R^{a} and —NR^{a}C₂₋₆alkylOR^{a}; wherein R^{a} is independently, at each instance, H or R^{b}; and R^{b} is independently, at each instance C₁₋₆alkyl substituted by 0, 1, 2 or 3 substituents selected from halo, C₁₋₄alk, C₁₋₃haloalk, —OC₁₋₄alk, —NH₂, —NHC₁₋₄alk, and —N(C₁₋₄alk)C₁₋₄alk; or any protonated form thereof, including alanine, valine, leucine, isoleucine, proline, serine, threonine, lysine, arginine, histidine, aspartate, glutamate, asparagine, glutamine, cysteine, methionine, hydroxyproline, cyclohexylalanine, norleucine, norvaline, 2-aminobutyric acid, but which residues do not contain an aryl or aromatic group. The term “aromatic amino acid residue” refers to amino acid residues in D- or L-form having side chains comprising aromatic groups. Exemplary aromatic residues include tryptophan, tyrosine, 3-(1-naphthyl)alanine, histidine, or phenylalanine residues. The term “basic amino acid residue” refers to amino acid residues in D- or L-form having side chains comprising basic groups. Exemplary basic amino acid residues include histidine, lysine, homolysine, ornithine, arginine, N-methyl-arginine, ω-aminoarginine, ω-methyl-arginine, 1-methyl-histidine, 3-methyl-histidine, and homoarginine (hR) residues. The term “hydrophilic amino acid residue” refers to amino acid residues in D- or L-form having side chains comprising polar groups. Exemplary hydrophilic residues include cysteine, serine, threonine, histidine, lysine, asparagine, aspartate, glutamate, glutamine, and citrulline (Cit) residues. The terms “lipophilic amino acid residue” refers to amino acid residues in D- or L-form having sidechains comprising uncharged, aliphatic or aromatic groups. Exemplary lipophilic sidechains include phenylalanine, isoleucine, leucine, methionine, valine, tryptophan, and tyrosine. Alanine (A) is amphiphilic—it is capable of acting as a hydrophilic, or lipophilic (i.e., hydrophobic), residue. Alanine, therefore, is included within the definition of both “lipophilic” (i.e., “hydrophobic”) residue and “hydrophilic” residue. The term “nonfunctional” or “neutral” amino acid residue refers to amino acid residues in D- or L-form having side chains that lack acidic, basic, or aromatic groups. Exemplary neutral amino acid residues include methionine, glycine, alanine, valine, isoleucine, leucine, and norleucine

[0046] Polypeptides may have amino acid substitutions. Desired amino acid substitutions (whether conservative or non-conservative) can be determined by those skilled in the art. Amino acid substitutions can be used to identify important residues of the polypeptide sequence, or to increase or decrease the affinity of the peptide or vehicle-peptide molecules (see preceding formulae) described herein.

[0047] In certain embodiments, conservative amino acid substitutions can encompass non-naturally occurring amino acid residues which are typically incorporated by chemical peptide synthesis rather than by synthesis in biological systems.

[0048] Conservative modifications can produce half-life extending moiety-conjugated peptides having functional, physical, and chemical characteristics similar to those of the conjugated (e.g., PEG-conjugated) peptide from which such modifications are made. In contrast, substantial modifications in the functional and/or chemical characteristics of peptides may be accomplished by selecting substitutions in the amino acid sequence that differ significantly in their effect on maintaining (a) the structure of the molecular backbone in the region of the substitution, for example, as an α-helical conformation, (b) the charge or hydrophobicity of the molecule at the target site, or (c) the size of the molecule.

[0049] For example, a “conservative amino acid substitution” may involve a substitution of a native amino acid residue with a nonnative residue such that there is little or no effect on the polarity or charge of the amino acid residue at that position. Furthermore, any native residue in the polypeptide may also be substituted with alanine, as has been previously described for “alanine scanning mutagenesis” (see, for example, MacLennan et al., Acta Physiol. Scand. Suppl., 643:55-67 (1998); Sasaki et al., 1998, Adv. Biophys. 35:1-24 (1998), which discuss alanine scanning mutagenesis).

[0050] Desired amino acid substitutions (whether conservative or non-conservative) can be determined by those skilled in the art at the time such substitutions are desired. For example, amino acid substitutions can be used to identify important residues of the peptide sequence, or to increase or decrease the affinity of the peptide or vehicle-conjugated peptide molecules described herein.

[0051] Naturally occurring residues may be divided into classes based on common side chain properties:

[0052] 1) hydrophobic: norleucine (Nor or Nle), Met, Ala, Val, Leu, Ile;

[0053] 2) neutral hydrophilic: Cys, Ser, Thr, Asn, Gln;

[0054] 3) acidic: Asp, Glu;

[0055] 4) basic: His, Lys, Arg;

[0056] 5) residues that influence chain orientation: Gly, Pro; and

[0057] 6) aromatic: Trp, Tyr, Phe.

[0058] Conservative amino acid substitutions may involve exchange of a member of one of these classes with another member of the same class. Conservative amino acid substitutions may encompass non-naturally occurring amino acid residues, which are typically incorporated by chemical peptide synthesis rather than by synthesis in biological systems. These include peptidomimetics and other reversed or inverted forms of amino acid moieties. Non-conservative substitutions may involve the exchange of a member of one of these classes for a member from another class.

[0059] In making such changes, according to certain embodiments, the hydropathic index of amino acids may be considered. Each amino acid has been assigned a hydropathic index on the basis of its hydrophobicity and charge characteristics. They are: isoleucine (+4.5); valine (+4.2); leucine (+3.8); phenylalanine (+2.8); cysteine/cystine (+2.5); methionine (+1.9); alanine (+1.8); glycine (−0.4); threonine (−0.7); serine (−0.8); tryptophan (−0.9); tyrosine (−1.3); proline (−1.6); histidine (−3.2); glutamate (−3.5); glutamine (−3.5); aspartate (−3.5); asparagine (−3.5); lysine (−3.9); and arginine (−4.5).

[0060] The importance of the hydropathic amino acid index in conferring interactive biological function on a protein is understood in the art (see, for example, Kyte et al., 1982, J. Mol. Biol. 157:105-131). It is known that certain amino acids may be substituted for other amino acids having a similar hydropathic index or score and still retain a similar biological activity. In making changes based upon the hydropathic index, in certain embodiments, the substitution of amino acids whose hydropathic indices are within ±2 is included. In certain embodiments, those that are within ±1 are included, and in certain embodiments, those within ±0.5 are included

[0061] Substitution of like amino acids can be made effectively on the basis of hydrophilicity. In certain embodiments, the greatest local average hydrophilicity of a protein, as governed by the hydrophilicity of its adjacent amino acids, correlates with its immunogenicity and antigenicity, i.e., with a biological property of the protein.

[0062] The following hydrophilicity values have been assigned to these amino acid residues: arginine (+3.0); lysine (+3.0); aspartate (+3.0±1); glutamate (+3.0±1); serine (+0.3); asparagine (+0.2); glutamine (+0.2); glycine (0); threonine (−0.4); proline (−0.5±1); alanine (−0.5); histidine (−0.5); cysteine (−1.0); methionine (−1.3); valine (−1.5); leucine (−1.8); isoleucine (−1.8); tyrosine (−2.3); phenylalanine (−2.5) and tryptophan (−3.4). In making changes based upon similar hydrophilicity values, in certain embodiments, the substitution of amino acids whose hydrophilicity values are within ±2 is included, in certain embodiments, those that are within ±1 are included, and in certain embodiments, those within ±0.5 are included.

[0063] Examples of conservative substitutions include the substitution of one non-polar (hydrophobic) amino acid residue such as isoleucine, valine, leucine norleucine, alanine, or methionine for another, the substitution of one polar (hydrophilic) amino acid residue for another such as between arginine and lysine, between glutamine and asparagine, between glycine and serine, the substitution of one basic amino acid residue such as lysine, arginine or histidine for another, or the substitution of one acidic residue, such as aspartic acid or glutamic acid for another. The phrase “conservative amino acid substitution” also includes the use of a chemically derivatized residue in place of a non-derivatized residue, provided that such polypeptide displays the requisite bioactivity. Other exemplary amino acid substitutions that can be useful are set forth in Table 2 below.

TABLE 2
Some Useful Amino Acid Substitutions.

| ORIGINAL | |
|---|---|
| RESIDUES | EXEMPLARY SUBSTITUTIONS |
| Ala | Val, Leu, Ile, Gly |
| Arg | Lys, Gln, Asn, His |
| Asn | Gln |
| Asp | Glu |
| Cys | Ser, Ala |
| Gln | Asn |
| Glu | Asp |
| Gly | Pro, Ala |
| His | Asn, Gln, Lys, Arg |
| Ile | Leu, Val, Met, Ala, Phe, Norleucine |
| Leu | Norleucine, Ile, Val, Met, Ala, Phe |
| Lys | Arg, 1,4-Diamino-butyric Acid, Gln, Asn, His |
| Met | Leu, Phe, Ile |
| Phe | Leu, Val, Ile, Ala, Tyr |
| Pro | Ala |
| Ser | Thr, Ala, Cys |
| Thr | Ser |
| Trp | Tyr, Phe |
| Tyr | Trp, Phe, Thr, Ser |
| Val | Ile, Met, Leu, Phe, Ala, Norleucine |

[0064] The term “agonist” should be understood to refer to something that can positively affect a process, e.g. activate or stimulate the process, the process can include, but is not limited to chemical, biochemical, cellular or physiological processes. An “APJ agonist” should be understood to refer to a molecule that is able to activate the APJ receptor. The APJ agonist may bind to the APJ receptor. Examples of agonists are provided in several Tables below and in several figures e.g. FIGS. 3 and 4. It can refer to a polypeptide having biological activity at least comparable to a naturally occurring apelin. The term further includes peptides that potentiate the effects of the naturally occurring molecule.

[0065] In one embodiment, the APJ agonist sequence has the following formula:

(SEQ ID NO: 61)
Nx¹x²x³x⁴x⁵x⁶x⁷x⁸x⁹x¹⁰x¹¹x¹²x¹³x¹⁴x¹⁵x¹⁶x¹⁷

[0066] wherein:

[0067] N is an extension or conjugation linker

[0068] x¹ is absent, is an amino acid residue (e.g. basic or polar), or is a conjugation linker;

[0069] x² is absent, is an amino acid residue (e.g. nonfunctional or hydrophobic), or is a conjugation linker;

[0070] x³ is absent, is an amino acid residue (e.g. basic or polar), or is a conjugation linker;

[0071] x⁴ is absent, is an amino acid residue (e.g. basic or polar), or is a conjugation linker;

[0072] x⁵ is absent or is a nonfunctional, hydrophobic, or polar residue (e.g. pE, Q, Cit, L, V, G, H or P); or a conjugation linker;

[0073] x⁶ is absent or is a polar or basic residue (e.g. K or Cit, R, NMeArg, or hArg);

[0074] x⁷ is a nonfunctional or hydrophobic residue (e.g. P, Oic, or G);

[0075] x⁸ is a basic or polar residue (e.g. Q or Cit, R, NMeArg, or hArg);

[0076] x⁹ is a nonfunctional or hydrophobic residue (e.g. V, I, or L preferred, NMeLeu or Cha);

[0077] x¹⁰ is a nonfunctional, polar, or hydrophobic residue, or a conjugation linker (e.g. S, F, and 4F-Phe);

[0078] x¹¹ is a nonfunctional, polar, basic, or hydrophobic residue, or a conjugation linker;

[0079] x¹² is a nonfunctional, hydrophobic, polar, or basic residue;

[0080] x¹³ is a nonfunctional or aromatic residue (e.g. G);

[0081] x¹⁴ is a nonfunctional or hydrophilic residue (e.g. P and Oic);

[0082] x¹⁵ is a nonfunctional, polar, or hydrophobic residue (e.g. aliphatic, aromatic, hydrophobic residues);

[0083] x¹⁶ is a nonfunctional or a hydrophobic residue (e.g. F, 4I-Phe, 4Cl-Phe, Bip, P, Oic);

[0084] x¹⁷ is absent or is a hydrophobic residue (e.g. aromatic residues

[0085] As mentioned above, an agonist can affect a physiological process. Thus, a modified peptide can have agonistic activity on the heart by increasing, for example, various aspects of contractility, such as dp/dt or heart rate.

[0086] The term “-antagonist peptide,” “peptide antagonist,” and “inhibitor peptide” should be understood to mean a peptide or polypeptide that blocks or in some way interferes with the biological activity of a receptor of interest, or has biological activity comparable to a known antagonist or inhibitor of a receptor of interest. For an apelin antagonistic peptide, the receptor of interest is the APJ receptor.

[0087] The term “aromatic residue” or “aromatic amino acid” should be understood to mean amino acid residues in D- or L-form having side chains comprising aromatic groups. Exemplary aromatic residues can include F, Y, and W.

[0088] The term “basic residue” refers to amino acid residues in D- or L-form having sidechains comprising basic groups. Exemplary basic residues can include H, K, and R.

[0089] The terms “derivatizing” and “derivative” or “derivatized” should be understood to mean processes and resulting compounds respectively in which a portion of the parent molecule or vehicle has been modified chemically. Examples can include: (1) a compound having a cyclic portion; for example, cross-linking between residues within the compound; (2) a compound cross-linked or having a cross-linking site; for example, the compound has a cysteinyl residue and thus forms cross-linked dimers; (3) one or more peptidyl linkages are replaced by a non-peptidyl linkage; (4) an N-terminus is modified with agents capable of reacting with the amino group; (5) the C-terminus can be replaced with an amide or ester; and (6) compounds in which individual amino acid moieties are modified through treatment with agents capable of reacting with selected side chains or terminal residues.

[0090] In various embodiments, the polypeptide and/or vehicle portion of the compounds may be derivatized. Such derivatives may improve the solubility, absorption, stability, biological half life, and the like of the compounds. The moieties may alternatively eliminate or attenuate any undesirable effects of the compounds.

[0091] The term “fusion protein” should be understood to mean that the protein includes polypeptide components derived from more than one parental protein or polypeptide. Typically, a fusion protein is expressed from a fusion gene in which a nucleotide sequence encoding a polypeptide sequence from one protein is appended in frame with, and optionally separated by a linker from, a nucleotide sequence encoding a polypeptide sequence from a different protein. The fusion gene can then be expressed by a recombinant host cell as a single protein.

[0092] The term “endogenous apelin peptides” should be understood to mean full-length Apelin preproprotein having sequence MNLRLCVQAL LLLWLSLTAV CGGSLMPLPD GNGLEDGNVR HLVQPRGSRN GPGPWQGGRR KFRRQRPRLS HKGPMPF (SEQ ID NO: 138). Apelin (42-77) also referred to as Apelin-36 having sequence LVQPRGSRNGPGPWQG GRRKFRRQRPRLSHKGPMPF (SEQ ID NO: 1), Apelin (65-77) also referred to as Apelin-13 having sequence QRPRLSHKGPMPF (SEQ ID NO: 2) or fragments of full-length Apelin. The clipped apelin peptides can also be referred to as isoforms of the molecule.

[0093] The term “isolated polypeptide” should be understood to mean a polypeptide molecule that is purified or separated from at least one contaminant polypeptide molecule with which it is ordinarily associated in the natural source of the polypeptide. An isolated polypeptide molecule is other than in the form or setting in which it is found in nature.

[0094] The term “APJ ligand” should be understood to mean a molecule that binds to APJ or forms a complex with APJ. The ligand may be, but is not necessarily a signal triggering molecule. In some instances the term “ligand” may be used interchangeably with agonist

[0095] The term “non-canonical” or “unnatural” amino acids should be understood to mean amino acid residues in D- or L-form that are not among the 20 canonical amino acids generally incorporated into naturally occurring proteins. Examples of non-canonical amino acids can be found in FIG. 1 and Table 3. Non-canonical amino acid residues can be incorporated into a peptide by employing known techniques of protein engineering that use recombinantly expressing cells. (See, e.g., Link et al., Non-canonical amino acids in protein engineering, Current Opinion in Biotechnology, 14(6):603-609 (2003). Additional examples of non-canonical amino acids include, for example, β-amino acids, homoamino acids, cyclic amino acids and amino acids with derivatized side chains. Additional examples can include (in the L-form or D-form) β-alanine, β-aminopropionic acid, piperidinic acid, aminocaprioic acid, aminoheptanoic acid, aminopimelic acid, desmosine, diaminopimelic acid, N^{α}-ethylglycine, N^{α}-ethylaspargine, hydroxylysine, allo-hydroxylysine, isodesmosine, allo-isoleucine, ω-methylarginine, N^{α}-methylglycine, N^{α}-methylisoleucine, N^{α}-methylvaline, γ-carboxyglutamate, ε-N,N,N-trimethyllysine, ε-N-acetyllysine, O-phosphoserine, N^{α}-acetylserine, N^{α}-formylmethionine, 3-methylhistidine, 5-hydroxylysine, and other similar amino acids, and those listed in Table 3 below, and derivatized forms of any of these as described herein. Table 3 and FIG. 1 contain some exemplary non-canonical amino acid residues that may be useful and associated abbreviations as typically used herein, although the skilled practitioner will understand that different abbreviations and nomenclatures may be applicable to the same substance and appear interchangeably herein. Some amino acid sequences, as recited herein may include “{H}-” at the N-terminal, which represents an N-terminus amino group, and/or may include “-{Free Acid}” at the C-terminal, which represents a C-terminus carboxy group.

[0096] In the event an abbreviation listed in Table 3 differs from another abbreviation for the same substance disclosed elsewhere herein, both abbreviations are understood to be applicable. The amino acids listed in Table 3 can be in the L-form or D-form, unless otherwise noted.

TABLE 3
Examples of non-canonical amino acids for substitution into peptide sequences.

| AMINO ACID | ABBREVIATION(S) |
|---|---|
| Acetamidomethyl | Acm |
| Acetylarginine | acetylarg |
| α-aminoadipic acid | Aad |
| aminobutyric acid | Abu |
| 2-aminobutyric acid | 2-Abu |
| 6-aminohexanoic acid | Ahx; εAhx |
| 3-amino-6-hydroxy-2-piperidone | Ahp |
| 2-aminoindane-2-carboxylic acid | Aic |
| α-amino-isobutyric acid | Aib |
| 3-amino-2-naphthoic acid | Anc |
| 2-aminotetraline-2-carboxylic acid | Atc |
| Aminophenylalanine | Aminophe; Amino-Phe |
| 4-amino-phenylalanine (also known as para- | 4AmP; 4-AminoF; 4-Amino-Phe |
| aminophenylalanine) | |
| 4-amidino-phenylalanine | 4AmPhe |
| 2-amino-2-(1-carbamimidoylpiperidin-4- | 4AmPig |
| yl)acetic acid | |
| ω-N-methylarginine | R(Me) |
| Arg ψ(CH₂NH)-reduced amide bond | rArg |
| 3-(1,2,3-triazol-4-yl)Alanine | Atz |
| (S)-2-amino-3-(1-(1-bromo-2-oxo-6,9,12- | Atz(PEG3-bromoacetamide) |
| trioxa-3-azatetradecan-14-yl)-1H-1,2,3- | |
| triazol-4-yl)propanoic acid | |
| 3-(1-(O-(aminoethyl)-O′-(ethylene)- | Atz(amino-PEG₁₀) |
| decaethyleneglycol)-1,2,3-triazol-4- | |
| yl)Alanine | |
| 3-(1-(O-(aminoethyl)-O′-(ethylene)- | Atz(20 kDa PEG) |
| ethyleneglycol450avg)-1,2,3-triazol-4- | |
| yl)Alanine | |
| (S)-2-amino-3-(1-(2-oxo- | Atz(PEG11-(acetamidomethyl) |
| 6,9,12,15,18,21,24,27,30,33,36-undecaoxa- | |
| 3-azaoctatriacontan-38-yl)-1H-1,2,3-triazol- | |
| 4-yl)propanoic acid | |
| (S)-2-amino-3-(1-(1-hydroxy-5-oxo- | Atz(PEG11-((2-hydroxyethyl)thio)acetamide) |
| 9,12,15,18,21,24,27,30,33,36,39-undecaoxa-3- | |
| thia-6-azahentetracontan-41-yl)-1H-1,2,3-triazol- | |
| 4-yl)propanoic acid | |
| (S)-2-amino-3-(1-(1-bromo-2-oxo- | Atz(PEG11-bromoacetamide) |
| 6,9,12,15,18,21,24,27,30,33,36-undecaoxa-3- | |
| azaoctatriacontan-38-yl)-1H-1,2,3-triazol-4- | |
| yl)propanoic acid | |
| (S)-2-amino-6-(3-(1-(1-bromo-2-oxo- | K(ethyl-triazole-PEG11-bromoacetamide) |
| 6,9,12,15,18,21,24,27,30,33,36-undecaoxa-3- | |
| azaoctatriacontan-38-yl)-1H-1,2,3-triazol-4- | |
| yl)propanamido)hexanoic acid | |
| β-alanine | bA |
| β-homoarginine | bhArg |
| β-homolysine | bhomoK |
| β-homo Tic | BhTic |
| β-homophenylalanine | BhPhe |
| β-homoproline | BhPro |
| β-homotryptophan | BhTrp |
| 4,4′-biphenylalanine; 4-phenyl-phenylalanine; or | Bip; 4Bip |
| biphenylalanine | |
| β,β-diphenyl-alanine | BiPhA |
| β-phenylalanine | BPhe |
| p-carboxyl-phenylalanine | Cpa |
| Citrulline | Cit |
| Cyclohexylalanine | Cha |
| Cyclohexylglycine | Chg |
| Cyclopentylglycine | Cpg |
| 4-tert-butyl-L-phenylalanine | 4tBu—F |
| 4-benzoyl-L-phenylalanine | 4-Bz—F |
| 2-chloro-L-phenylalanine | 2-Cl—F |
| 4-trifluoromethyl-L-phenylalanine | 4CF3—F |
| 4-fluoro-L-phenylalanine | 4-F—F |
| 4-methyl-L-phenylalanine | 4-Me—F |
| 2-amino-3-guanidinopropanoic acid | 3G-Dpr |
| α,γ-diaminobutyric acid | Dab |
| 2,4-diaminobutyric acid | Dbu |
| diaminopropionic acid | Dap |
| 3,4-dichloro-L-phenylalanine | DiCl—F |
| 3,4-dimethoxy-L-phenylalanine | DiMeO—F |
| α,β-diaminopropionoic acid (or 2,3- | Dpr |
| diaminopropionic acid | |
| 3,3-diphenylalanine | Dip |
| 4-guanidino phenylalanine | Guf |
| 4-guanidino proline | 4GuaPr |
| Homoarginine | hArg; hR |
| Homocitrulline | hCit |
| Homoglutamine | hQ |
| Homoleucine | hLeu; hL |
| Homolysine | hLys; hK; homoLys |
| Homophenylalanine | hPhe; homoPhe |
| 4-hydroxyproline (or hydroxyproline) | Hyp |
| 2-indanylglycine (or indanylglycine) | IgI |
| indoline-2-carboxylic acid | Idc |
| Iodotyrosine | I-Tyr |
| Lys ψ(CH₂NH)-reduced amide bond | rLys |
| (S)-6-((S)-2-acetamidopent-4-ynamido)-2- | K(Ac-Pra) |
| aminohexanoic acid | |
| N-ε-biotinyl-L-lysine | K(Biotin) |
| (S)-2,2′,2″-(10-(2-((5-amino-5- | K(DOTA) |
| carboxypentyl)amino)-2-oxoethyl)-1,4,7,10- | |
| tetraazacyclododecane-1,4,7-triyl)triacetic acid | |
| (S)-2-amino-6-(pent-4-ynamido)hexanoic acid | K(4-Pen) |
| methionine oxide | Met[O] |
| methionine sulfone | Met[O]₂ |
| N^{α}-methylarginine | NMeR |
| Nα-[(CH₂)₃NHCH(NH)NH₂] substituted glycine | N-Arg |
| N^{α}-methylcitrulline | NMeCit |
| N^{α}-methylglutamine | NMeQ |
| N^{α}-methylhomocitrulline | N^{α}-MeHoCit |
| N^{α}-methylhomolysine | NMeHoK |
| N^{α}-methylleucine | N^{α}-MeL; NMeL; NMeLeu; NMe-Leu |
| N^{α}-methyllysine | NMe—Lys |
| Nε-methyl-lysine | N-eMe—K |
| Nε-ethyl-lysine | N-eEt—K |
| Nε-isopropyl-lysine | N-eIPr—K |
| N^{α}-methylnorleucine | NMeNle; NMe-Nle |
| N^{α}-methylornithine | N^{α}-MeOrn; NMeOrn |
| N^{α}-methylphenylalanine | NMe-Phe |
| 1′N-methyltryptophan | 1′NMeW |
| 4-methyl-phenylalanine | MePhe |
| α-methylphenyalanine | AMeF |
| N^{α}-methylthreonine | NMe-Thr; NMeThr |
| N^{α}-methylvaline | NMeVal; NMe-Val |
| Nε-(O-(aminoethyl)-O′-(2-propanoyl)- | K(NPeg11) |
| undecaethyleneglycol)-Lysine | |
| Nε-(O-(aminoethyl)-O′-(2-propanoyl)- | K(NPeg27) |
| (ethyleneglycol)27-Lysine | |
| 3-(1-naphthyl)alanine | 1-Nal; 1Nal |
| 3-(2-naphthyl)alanine | 2-Nal; 2Nal |
| nipecotic acid | Nip |
| Nitrophenylalanine | nitrophe |
| norleucine | Nle |
| norvaline | Nva or Nvl |
| O-methyltyrosine | Ome-Tyr |
| (S)-octylglycine | OctylG |
| octahydroindole-2-carboxylic acid | Oic |
| Ornithine | Orn |
| Orn ψ(CH2NH)-reduced amide bond | rOrn |
| pyroglutamic acid | pGlu; PE; pE |
| L-phosphoserine | pS |
| 4-piperidinylalanine | 4PipA |
| 4-pyridinylalanine | 4Pal |
| 3-pyridinylalanine | 3Pal |
| 2-pyridinylalanine | 2Pal |
| para-iodophenylalanine (or 4-iodophenylalanine) | pI-Phe |
| Phenylglycine | Phg |
| Propargylglycine | Pra |
| pipecolic acid | Pip |
| 4-amino-1-piperidine-4-carboxylic acid | 4Pip |
| Sarcosine | Sar |
| 1,2,3,4-tetrahydroisoquinoline | Tic |
| 1,2,3,4-tetrahydroisoquinoline-1-carboxylic acid | Tiq |
| 1,2,3,4-tetrahydroisoquinoline-7-hydroxy-3- | Hydroxyl-Tic |
| carboxylic acid | |
| 1,2,3,4-tetrahydronorharman-3-carboxylic acid | Tpi |
| thiazolidine-4-carboxylic acid | Thz |
| 3-thienylalanine | Thi |
| (S)-tert-butylglycine | Tle |
| symmetrical N′-ω-dimethyl arginine | SDMA |
| N-ε-dimethyl lysine | K(Me2) |
| 4-carboxyphenylalanine | 4CO2—F |

[0097] The term “nonfunctional residue” or “nonfunctional amino acid” should be understood to mean amino acid residues in D- or L-form having sidechains that lack acidic, basic, or aromatic groups. Exemplary nonfunctional amino acid residues can include M, G, A, V, I, L and norleucine (Nle).

[0098] The term “polymeric nanostructure” may be understood to mean nanoparticle e.g. microsphere formulation containing the 50:50 poly(D,L-lactide-co-glycolide) polymer from Amylin (Diabetes Technol. Ther. 13:1145-1154, 2011; Endocrine J. 56:951-962, 2009 or Medincel (WO2012090070A2).

[0099] The term “physiologically acceptable salts” should be understood to mean any salts that are known or later discovered to be pharmaceutically acceptable to a formulation of the APJ agonists. Some specific examples are: acetate; trifluoroacetate; hydrohalides, such as hydrochloride and hydrobromide; sulfate; citrate; tartrate; glycolate; and oxalate. In various embodiments, physiologically acceptable salts of the polypeptides and compositions of matter are contemplated.

[0100] The term “serum protein binding moiety” should be understood to refer to binding to endogenous (native) proteins commonly found in the blood in high abundance. Human serum albumin is an example of such a protein. Binding to such molecules can allow a drug to adopt serum binding protein pharmacokinetics which can be an advantageous property.

[0101] The term “membrane protein binding moiety” should be understood to refer to binding to a protein embedded or spanning the cellular lipid bilayer.

[0102] The term “polar residue” or “polar amino acid” should be understood to refer to amino acid residues in D- or L-form having side chains comprising polar groups. Exemplary polar residues can include C, S, T, N, and Q.

[0103] The term “polynucleotide” or “nucleic acid” should be understood to include both single-stranded and double-stranded nucleotide polymers containing two or more nucleotide residues. The nucleotide residues comprising the polynucleotide can be ribonucleotides or deoxyribonucleotides or a modified form of either type of nucleotide. Said modifications include base modifications such as bromouridine and inosine derivatives, ribose modifications such as 2′,3′-dideoxyribose, and internucleotide linkage modifications such as phosphorothioate, phosphorodithioate, phosphoroselenoate, phosphorodiselenoate, phosphoroanilothioate, phosphoraniladate and phosphoroamidate.

[0104] The term “polypeptide,” “peptide” and “protein” are used interchangeably herein and include two or more amino acids linked covalently through peptide bonds. The terms do not refer to a specific length of the product. Thus, “peptides,” and “oligopeptides,” are included within the definition of polypeptide. The terms include post-translational modifications of the polypeptide, for example, glycosylations, acetylations, biotinylations, 4-pentynoylations, PEGylations, phosphorylations and the like. In addition, protein fragments, analogs, mutated or variant proteins, fusion proteins and the like are included within the meaning of polypeptide. The terms also include molecules in which one or more amino acid analogs or non-canonical or unnatural amino acids are included as can be expressed recombinantly using known protein engineering techniques. In addition, fusion proteins can be derivatized as described herein by well-known organic chemistry techniques.

[0105] A composition that includes a peptide or polypeptide covalently linked, attached, or bound, either directly or indirectly through a linker moiety, to another peptide or polypeptide or to a half-life extending moiety is a “conjugate” or “conjugated” molecule, whether conjugated by chemical means (e.g., post-translationally or post-synthetically) or by recombinant fusion.

[0106] The term “polypeptide analog” or “peptide analog” should be understood to mean a polypeptide having a sequence that differs from a polypeptide sequence existing in nature by at least one amino acid residue substitution, internal addition, or internal deletion of at least one amino acid, and/or amino- or carboxy-terminal end truncations or additions, and/or carboxy-terminal amidation. An “internal deletion” refers to absence of an amino acid from a sequence existing in nature at a position other than the N- or C-terminus. Likewise, an “internal addition” refers to presence of an amino acid in a sequence existing in nature at a position other than the N- or C-terminus.

[0107] The term “residue” can be used interchangeably with “amino acid”

[0108] The term “recombinant” should be understood to mean that the material (e.g., a nucleic acid or a polypeptide) has been artificially or synthetically (i.e., non-naturally) altered by human intervention. The alteration can be performed on the material within, or removed from, its natural environment or state. For example, a “recombinant nucleic acid” is one that is made by recombining nucleic acids, e.g., during cloning, DNA shuffling or other well known molecular biological procedures. Examples of such molecular biological procedures are found in Maniatis et al., Molecular Cloning. A Laboratory Manual. Cold Spring Harbor Laboratory, Cold Spring Harbor, N.Y. (1982). A “recombinant DNA molecule,” is comprised of segments of DNA joined together by means of such molecular biological techniques. The term “recombinant protein” or “recombinant polypeptide” as used herein refers to a protein molecule which is expressed using a recombinant DNA molecule. A “recombinant host cell” is a cell that contains and/or expresses a recombinant nucleic acid.

[0109] The term “vehicle” should be understood to mean, inter alia, a molecule that prevents degradation and/or increases half-life, reduces toxicity, reduces immunogenicity, or increases biological activity of a therapeutic molecule. Exemplary vehicles can include polymers (e.g., polyethylene glycol (PEG); lipids; cholesterol group (such as a steroid); a carbohydrate or oligosaccharide (e.g., dextran); any natural or synthetic protein (e.g., an Ab or Fc domain); or any polypeptide or peptide that binds to a salvage receptor.

[0110] In various embodiments, a composition of matter is provided in which an APJ agonist polypeptide may be attached to a vehicle through the polypeptide's N-terminus, C-terminus, backbone, or side-chain via chemical modification. Thus, the vehicle-peptide molecules may be described by the following formula I:

[chemical structure]

wherein:
V¹ is a vehicle (e.g. a PEG);

[0111] A¹, A², A³, and A⁴ are each independently selected from -(L¹)ₑ-P¹, -(L¹)ₑ-P¹-(L²)_{f}-P², -(L¹)ₑ-P¹-(L²)_{f}-P²-(L³)_{g}-P³, -(L¹)ₑ-P¹-(L²)_{f}-P²-(L³)_{g}-P³-(L⁴)ₕ-P⁴, and higher multimers thereof.

[0112] P¹, P², P³, and P⁴ are each independently sequences of APJ agonist domains;

[0113] L¹, L², L³, and L⁴ are each independently linkers; and

[0114] a, b, c, d, e, f, g, and h are each independently 0 or 1, provided that at least one of a, b, and c is 1.

[0115] Thus, compound II can comprise the formulae:

V¹-A¹

and multimers thereof wherein V¹ is a PEG and is attached, with or without linker, at the N-terminus of A¹;

[0116] Compound III can comprise the formulae:

[chemical structure]

and multimers thereof wherein V¹ is a PEG and is attached, with or without linker, at the backbone or side-chain of A²;

[0117] Compound IV can comprise the formulae:

A³-V¹

and multimers thereof wherein V¹ is a PEG and is attached, with or without linker, at the C-terminus of A³;

[0118] Compound V can comprise the formulae:

A²-V¹-A¹

and multimers thereof wherein V¹ is a PEG and is attached, with or without linker, at any location of A1 and A2;

[0119] Compound VI can comprise the formulae

[chemical structure]

and multimers thereof wherein V¹ is a PEG and is attached, with or without linker, at any location of A1, A2, A3, or A4;

[0120] Compound VII can comprise the formulae:

[chemical structure]

and multimers thereof wherein V¹ and V² are a PEG and are attached, with or without linker, at any location of A¹.

[0121] Recombinant DNA- and/or RNA-mediated protein expression and protein engineering techniques, or any other methods of preparing peptides, are applicable to the making of the polypeptides disclosed herein. For example, the peptides can be made in transformed host cells. Briefly, a recombinant DNA molecule, or construct, coding for the peptide is prepared. Methods of preparing such DNA molecules are well known in the art. For instance, sequences encoding the peptides can be excised from DNA using suitable restriction enzymes. Any of a large number of available and well-known host cells may be used in the practice of various embodiments. The selection of a particular host is dependent upon a number of factors recognized by the art. These include, for example, compatibility with the chosen expression vector, toxicity of the peptides encoded by the DNA molecule, rate of transformation, ease of recovery of the peptides, expression characteristics, bio-safety and costs. A balance of these factors should be struck with the understanding that not all hosts may be equally effective for the expression of a particular DNA sequence. Within these general guidelines, useful microbial host cells in culture include bacteria (such as Escherichia coli sp.), yeast (such as Saccharomyces sp.) and other fungal cells, insect cells, plant cells, mammalian (including human) cells, e.g., CHO cells and HEK293 cells. Modifications can be made at the DNA level, as well. The peptide-encoding DNA sequence may be changed to codons more compatible with the chosen host cell. For E. coli, optimized codons are known in the art. Codons can be substituted to eliminate restriction sites or to include silent restriction sites, which may aid in processing of the DNA in the selected host cell. Next, the transformed host is cultured and purified. Host cells may be cultured under conventional fermentation conditions so that the desired compounds are expressed. Such fermentation conditions are well known in the art. In addition, the DNA optionally further encodes, 5′ to the coding region of a fusion protein, a signal peptide sequence (e.g., a secretory signal peptide) operably linked to the expressed peptide analog. For further examples of appropriate recombinant methods and exemplary DNA constructs useful for recombinant expression of the compositions by mammalian cells, including dimeric Fc fusion proteins (“peptibodies”) or chimeric immunoglobulin(light chain+heavy chain)-Fc heterotrimers (“hemibodies”), see, e.g., Sullivan et al., Toxin Peptide Therapeutic Agents, US2007/0071764 and Sullivan et al., Toxin Peptide Therapeutic Agents, PCT/US2007/022831, published as WO 2008/088422, which are both incorporated herein by reference in their entireties.

[0122] Peptide compositions can also be made by synthetic methods. Solid phase synthesis can be used as a technique of making individual peptides since it is the most cost-effective method of making small peptides. For example, well known solid phase synthesis techniques include the use of protecting groups, linkers, and solid phase supports, as well as specific protection and deprotection reaction conditions, linker cleavage conditions, use of scavengers, and other aspects of solid phase peptide synthesis. Suitable techniques are well known in the art. (E.g., Merrifield (1973), Chem. Polypeptides, pp. 335-61 (Katsoyannis and Panayotis eds.); Merrifield (1963), J. Am. Chem. Soc. 85: 2149; Davis et al. (1985), Biochem. Intl. 10: 394-414; Stewart and Young (1969), Solid Phase Peptide Synthesis; U.S. Pat. No. 3,941,763; Finn et al. (1976), The Proteins (3rd ed.) 2: 105-253; and Erickson et al. (1976), The Proteins (3rd ed.) 2: 257-527; “Protecting Groups in Organic Synthesis,” 3rd Edition, T. W. Greene and P. G. M. Wuts, Eds., John Wiley & Sons, Inc., 1999; NovaBiochem Catalog, 2000; “Synthetic Peptides, A User's Guide,” G. A. Grant, Ed., W.H. Freeman & Company, New York, N.Y., 1992; “Advanced Chemtech Handbook of Combinatorial & Solid Phase Organic Chemistry,” W. D. Bennet, J. W. Christensen, L. K. Hamaker, M. L. Peterson, M. R. Rhodes, and H. H. Saneii, Eds., Advanced Chemtech, 1998; “Principles of Peptide Synthesis, 2nd ed.,” M. Bodanszky, Ed., Springer-Verlag, 1993; “The Practice of Peptide Synthesis, 2nd ed.,” M. Bodanszky and A. Bodanszky, Eds., Springer-Verlag, 1994; “Protecting Groups,” P. J. Kocienski, Ed., Georg Thieme Verlag, Stuttgart, Germany, 1994; “Fmoc Solid Phase Peptide Synthesis, A Practical Approach,” W. C. Chan and P. D. White, Eds., Oxford Press, 2000, G. B. Fields et al., Synthetic Peptides: A User's Guide, 1990, 77-183). For further examples of synthetic and purification methods known in the art, which are applicable to making the compositions of matter, see, e.g., Sullivan et al, US2007/0071764 and Sullivan et al., PCT/US2007/022831, published as WO 2008/088422 A2, which are both incorporated herein by reference in their entireties.

[0123] One or more useful modifications to peptide domains can include amino acid additions or insertions, amino acid deletions, peptide truncations, amino acid substitutions, and/or chemical derivatization of amino acid residues, accomplished by known chemical techniques. For example, the thusly modified amino acid sequence includes at least one amino acid residue inserted or substituted therein, relative to the amino acid sequence of the native sequence of interest, in which the inserted or substituted amino acid residue has a side chain comprising a nucleophilic or electrophilic reactive functional group by which the peptide is covalently conjugated to a linker and/or half-life extending moiety. Useful examples of such a nucleophilic or electrophilic reactive functional group include, but are not limited to, a thiol, a primary amine, a seleno, a hydrazide, an aldehyde, a carboxylic acid, a ketone, an aminooxy, a masked (protected) aldehyde, or a masked (protected) keto functional group. Examples of amino acid residues having a side chain comprising a nucleophilic reactive functional group include, but are not limited to, a lysine residue, a homolysine, an α,β-diaminopropionic acid residue, an α,γ-diaminobutyric acid residue, an ornithine residue, a cysteine, a homocysteine, a glutamic acid residue, an aspartic acid residue, or a selenocysteine (“SeCys”) residue.

[0124] The peptide portions of the compositions of matter can also be chemically derivatized at one or more amino acid residues by known organic chemistry techniques. “Chemical derivative” or “chemically derivatized” refers to a subject peptide having one or more residues chemically derivatized by reaction of a functional side group. Such derivatized molecules include, for example, those molecules in which free amino groups have been derivatized to form amine hydrochlorides, p-toluene sulfonyl groups, carbobenzoxy groups, t-butyloxycarbonyl groups, chloroacetyl groups or formyl groups. Free carboxyl groups may be derivatized to form salts, methyl and ethyl esters or other types of esters or hydrazides. Free hydroxyl groups may be derivatized to form O-acyl or O-alkyl derivatives. The imidazole nitrogen of histidine may be derivatized to form N-im-benzylhistidine. Also included as chemical derivatives are those peptides which contain one or more naturally occurring amino acid derivatives of the twenty canonical amino acids, whether in L- or D-form. For example, 4-hydroxyproline may be substituted for proline; 5-hydroxylysine maybe substituted for lysine; 3-methylhistidine may be substituted for histidine; homoserine may be substituted for serine; and ornithine may be substituted for lysine.

[0125] Useful derivatizations include, in some embodiments, those in which the amino terminal of the peptide is chemically blocked so that conjugation with the vehicle will be prevented from taking place at an N-terminal free amino group. There may also be other beneficial effects of such a modification, for example a reduction in the peptide analog's susceptibility to enzymatic proteolysis. The N-terminus can be acylated or modified to a substituted amine, or derivatized with another functional group, such as an aromatic moiety (e.g., an indole acid, benzyl (Bzl or Bn), dibenzyl (DiBz1 or Bn₂), or benzyloxycarbonyl (Cbz or Z)), N,N-dimethylglycine or creatine. For example, in some embodiments, an acyl moiety, such as, but not limited to, a formyl, acetyl (Ac), propanoyl, butanyl, heptanyl, hexanoyl, octanoyl, or nonanoyl, can be covalently linked to the N-terminal end of the peptide, which can prevent undesired side reactions during conjugation of the vehicle to the peptide. Other exemplary N-terminal derivative groups include —NRR¹ (other than —NH₂), —NRC(O)R¹, —NRC(O)OR¹, —NRS(O)₂R¹, —NHC(O)NHR¹, succinimide, or benzyloxycarbonyl-NH— (Cbz-NH—), wherein R and R¹ are each independently hydrogen or lower alkyl and wherein the phenyl ring may be substituted with 1 to 3 substituents selected from C₁-C₄ alkyl, C₁-C₄ alkoxy, chloro, and bromo.

[0126] In some embodiments, one or more peptidyl [—C(O)NR—] linkages (bonds) between amino acid residues can be replaced by a non-peptidyl linkage. Exemplary non-peptidyl linkages are —CH₂-carbamate [—CH₂—OC(O)NR—], phosphonate, —CH₂-sulfonamide [—CH₂—S(O)₂NR—], urea [—NHC(O)NH—], —CH₂-secondary amine, and alkylated peptide [—C(O)NR⁶— wherein R⁶ is lower alkyl].

[0127] In some embodiments, one or more individual amino acid residues can be derivatized. Various derivatizing agents are known to react specifically with selected sidechains or terminal residues, as described in detail below by way of example.

[0128] Lysinyl residues and amino terminal residues may be reacted with succinic or other carboxylic acid anhydrides, which reverse the charge of the lysinyl residues. Other suitable reagents for derivatizing alpha-amino-containing residues include imidoesters such as methyl picolinimidate; pyridoxal phosphate; pyridoxal; chloroborohydride; trinitrobenzenesulfonic acid; O-methylisourea; 2,4 pentanedione; and transaminase-catalyzed reaction with glyoxylate.

[0129] Arginyl residues may be modified by reaction with any one or combination of several conventional reagents, including phenylglyoxal, 2,3-butanedione, 1,2-cyclohexanedione, and ninhydrin. Derivatization of arginyl residues requires that the reaction be performed in alkaline conditions because of the high pKa of the guanidine functional group. Furthermore, these reagents may react with the groups of lysine as well as the arginine epsilon-amino group.

[0130] Specific modification of tyrosyl residues has been studied extensively, with particular interest in introducing spectral labels into tyrosyl residues by reaction with aromatic diazonium compounds or tetranitromethane. Most commonly, N-acetylimidizole and tetranitromethane are used to form O-acetyl tyrosyl species and 3-nitro derivatives, respectively.

[0131] Carboxyl sidechain groups (aspartyl or glutamyl) may be selectively modified by reaction with carbodiimides (R′—N═C═N—R′) such as 1-cyclohexyl-3-(2-morpholinyl-(4-ethyl) carbodiimide or 1-ethyl-3-(4-azonia-4,4-dimethylpentyl) carbodiimide. Furthermore, aspartyl and glutamyl residues may be converted to asparaginyl and glutaminyl residues by reaction with ammonium ions.

[0132] Glutaminyl and asparaginyl residues may be deamidated to the corresponding glutamyl and aspartyl residues. Alternatively, these residues are deamidated under mildly acidic conditions. Either form of these residues falls within the scope of the various embodiments.

[0133] Cysteinyl residues can be replaced by amino acid residues or other moieties either to eliminate disulfide bonding or, conversely, to stabilize cross-linking. (See, e.g., Bhatnagar et al., J. Med. Chem., 39:3814-3819 (1996)).

[0134] Derivatization with bifunctional agents is useful for cross-linking the peptides or their functional derivatives to a water-insoluble support matrix, if desired, or to other macromolecular vehicles. Commonly used cross-linking agents include, e.g., 1,1-bis(diazoacetyl)-2-phenylethane, glutaraldehyde, N-hydroxysuccinimide esters, for example, esters with 4-azidosalicylic acid, homobifunctional imidoesters, including disuccinimidyl esters such as 3,3′-dithiobis(succinimidylpropionate), and bifunctional maleimides such as bis-N-maleimido-1,8-octane. Derivatizing agents such as methyl-3-[(p-azidophenyl)dithio]propioimidate yield photoactivatable intermediates that are capable of forming crosslinks in the presence of light. Alternatively, reactive water-insoluble matrices such as cyanogen bromide-activated carbohydrates and the reactive substrates, e.g., as described in U.S. Pat. Nos. 3,969,287; 3,691,016; 4,195,128; 4,247,642; 4,229,537; and 4,330,440, are employed for protein immobilization.

[0135] Other possible modifications include hydroxylation of proline and lysine, phosphorylation of hydroxyl groups of seryl or threonyl residues, oxidation of the sulfur atom in Cys, methylation of the alpha-amino groups of lysine, arginine, and histidine side chains. Creighton, Proteins: Structure and Molecule Properties (W. H. Freeman & Co., San Francisco), 79-86 (1983).

[0136] The above examples of derivatizations are not intended to be an exhaustive treatment, but merely illustrative.

[0137] In various embodiments one may wish to modulate the pharmacokinetic profile of an APJ agonist polypeptide. For modulation of the pharmacokinetic profile to fit a therapeutic need, various embodiments can include one or more half-life extending moieties of various masses and configurations, which half-life extending moiety, or moieties, can be covalently fused, attached, linked or conjugated to the polypeptide. A “half-life extending moiety” refers to a molecule that prevents or mitigates in vivo degradation by proteolysis or other activity-diminishing chemical modification, increases in vivo or in vitro half-life or other pharmacokinetic properties such as, but not limited to decreasing the rate of renal or hepatic clearance rate, increasing the rate of absorption, reduces toxicity, reduces immunogenicity, improves solubility, increases biological activity and/or target selectivity of the peptide analog with respect to a target of interest, and/or increases manufacturability, compared to an unconjugated form of the polypeptide analog. The half-life extending moiety can be one that is pharmaceutically acceptable.

[0138] The half-life extending moiety can be selected such that a polypeptide or composition described herein can achieve a sufficient hydrodynamic size to prevent clearance by renal filtration in vivo. For example, a half-life extending moiety can be selected that is a polymeric macromolecule, which is substantially straight chain, branched-chain (br), or dendritic in form. Alternatively, a half-life extending moiety can be selected such that, in vivo, the polypeptide or composition of matter will bind to a serum protein to form a complex, such that the complex thus formed avoids substantial renal clearance. The half-life extending moiety can be, for example, a lipid; a cholesterol group (such as a steroid); a carbohydrate or oligosaccharide; a polymer; or any natural or synthetic protein, polypeptide or peptide that binds to a salvage receptor.

[0139] Exemplary half-life extending moieties that can be used can include an immunoglobulin Fc domain, or a portion thereof, or a biologically suitable polymer or copolymer, for example, a polyalkylene glycol compound, such as a polyethylene glycol (PEG) or a polypropylene glycol. Other appropriate polyalkylene glycol compounds include, but are not limited to, charged or neutral polymers of the following types: dextran, polylysine, colominic acids or other carbohydrate based polymers, polymers of amino acids, and biotin derivatives. In some monomeric fusion or conjugate protein embodiments an immunoglobulin (including light and heavy chains) or a portion thereof, can be used as a half-life-extending moiety, preferably an immunoglobulin of human origin, and including any of the immunoglobulins, such as, but not limited to, IgG1, IgG2, IgG3 or IgG4.

[0140] Other examples of the half-life extending moiety, include a copolymer of ethylene glycol, a copolymer of propylene glycol, a carboxymethylcellulose, a polyvinyl pyrrolidone, a poly-1,3-dioxolane, a poly-1,3,6-trioxane, an ethylene maleic anhydride copolymer, a polyaminoacid (e.g., polylysine or polyornithine), a dextran n-vinyl pyrrolidone, a poly n-vinyl pyrrolidone, a propylene glycol homopolymer, a propylene oxide polymer, an ethylene oxide polymer, a polyoxyethylated polyol, a polyvinyl alcohol, a linear or branched glycosylated chain, a polyacetal, a long chain fatty acid, a long chain hydrophobic aliphatic group, or a polysialic acid (e.g., PolyXen™ technology; Gregoriadis et al., Improving the therapeutic efficacy of peptides and proteins: a role for polysialic acids, Intl. J. Pharmaceutics, 300:125-30 (2005), incorporated herein by reference in its entirety).

[0141] In other embodiments, the half-life extending moiety can be an anionically charged chemical entity, covalently linked to the N-terminus of the peptide analog, which anionically charged chemical entities include, but are not limited to, phosphotyrosine, phosphoserine, p-phosphono(difluoro-methyl)-phenylalanine (Pfp), p-phosphono-methyl-phenylalanine (Pmp), p-phosphatidyl-phenylalanine (Ppa), or p-phosphono-methylketo-phenylalanine (Pkp), which can be covalently linked to the N-terminal of the peptide analog, optionally indirectly, via an AEEA linker or other linker as described herein. (See, Chandy et al.)

[0142] Other embodiments of the half-life extending moiety can include peptide ligands or small (organic) molecule ligands that have binding affinity for a long half-life serum protein under physiological conditions of temperature, pH, and ionic strength. Examples include an albumin-binding peptide or small molecule ligand, a transthyretin-binding peptide or small molecule ligand, a thyroxine-binding globulin-binding peptide or small molecule ligand, an antibody-binding peptide or small molecule ligand, or another peptide or small molecule that has an affinity for a long half-life serum protein. (See, e.g., Blaney et al., Method and compositions for increasing the serum half-life of pharmacologically active agents by binding to transthyretin-selective ligands, U.S. Pat. No. 5,714,142; Sato et al., Serum albumin binding moieties, US 2003/0069395 A1; Jones et al., Pharmaceutical active conjugates, U.S. Pat. No. 6,342,225).

[0143] A “long half-life serum protein” is one of the hundreds of different proteins dissolved in mammalian blood plasma, including so-called “carrier proteins” (such as albumin, transferrin and haptoglobin), fibrinogen and other blood coagulation factors, complement components, immunoglobulins, enzyme inhibitors, precursors of substances such as angiotensin and bradykinin and many other types of proteins. Various embodiments can encompass the use of any single species of pharmaceutically acceptable half-life extending moiety, such as, but not limited to, those described herein, or the use of a combination of two or more different half-life extending moieties, such as PEG and immunoglobulin Fc domain or a portion thereof (see, e.g., Feige et al., Modified peptides as therapeutic agents, U.S. Pat. No. 6,660,843), such as a CH2 domain of Fc, albumin (e.g., human serum albumin (HSA); see, e.g., Rosen et al., Albumin fusion proteins, U.S. Pat. No. 6,926,898 and US 2005/0054051; Bridon et al., Protection of endogenous therapeutic peptides from peptidase activity through conjugation to blood components, U.S. Pat. No. 6,887,470), a transthyretin (TTR; see, e.g., Walker et al., Use of transthyretin peptide/protein fusions to increase the serum half-life of pharmacologically active peptides/proteins, US 2003/0195154 A1; 2003/0191056 A1), or a thyroxine-binding globulin (TBG), or a combination such as immunoglobulin(light chain+heavy chain) and Fc domain (the heterotrimeric combination a so-called “hemibody”), for example as described in Sullivan et al., Toxin Peptide Therapeutic Agents, PCT/US2007/022831, published as WO 2008/088422, which is incorporated herein by reference in its entirety.

[0144] Conjugation of the peptide analogs(s) to the half-life extending moiety, or moieties, can be via the N-terminus and/or C-terminus of the peptide, or can be intercalary as to its primary amino acid sequence, F1 being linked closer to the peptide analog's N-terminus.

[0145] Particularly useful half-life extending moieties include immunoglobulins (e.g., human immunoglobulin, including IgG1, IgG2, IgG3 or IgG4). The term “immunoglobulin” encompasses full antibodies comprising two dimerized heavy chains (HC), each covalently linked to a light chain (LC); a single undimerized immunoglobulin heavy chain and covalently linked light chain (HC+LC); or a chimeric immunoglobulin (light chain+heavy chain)-Fc heterotrimer (a so-called “hemibody”).

[0146] Extending the half-life of the non-degraded APJ agonist can also be referred to as increased “stability.” In various circumstances, it can be imagined that modification of the peptide, e.g. addition of a PEG molecule could extend the half-life of a degraded fragment of the endogenous apelin molecule which may not necessarily lead to increased stability of the bioactive apelin. Increased stability can also be understood to mean reduced clearance of the agonist or overall increased exposure of the agonist or an agonist with a modification or combination of modifications that reduces the rate of metabolic degradation relative to unmodified agonist. Increased stability can prolong half-life of the agonist in biological matrices such as plasma and tissue homogenates in vitro and prolong plasma residence times in vivo. In vivo plasma residence times should be understood to mean circulating life-time of the intact peptide drug entity administered into an animal. In vitro plasma residence times should be understood to mean life-time of the intact peptide drug entity after addition in biological medium.

[0147] Modifications of the APJ agonist can also lead to increased “potency” of the molecule, e.g. improving the pharmokinetic or pharmacodynamic properties of the molecule. Increased potency can also be understood to mean an agonist with a modification or combination of modifications that reduces the rate of metabolic degradation relative to unmodified agonist. Increased stability can prolong half-life or the agonist in biological matrices such as plasma and tissue homogenates in vitro and prolong plasma residence times in vivo. Increased potency may further be understood to mean increased affinity and/or efficacyof the receptor.

[0148] An “Fc region”, or used interchangeably herein, “Fc domain” or “immunoglobulin Fc domain”, contains two heavy chain fragments, which in a full antibody comprise the _{CH}1 and _{CH}2 domains of the antibody. The two heavy chain fragments are held together by two or more disulfide bonds and by hydrophobic interactions of the _{CH}3 domains.

[0149] As noted above, polymer half-life extending moieties can also be used. Various means for attaching chemical moieties useful as half-life extending moieties are currently available, see, e.g., Patent Cooperation Treaty (“PCT”) International Publication No. WO 96/11953, entitled “N-Terminally Chemically Modified Protein Compositions and Methods,” herein incorporated by reference in its entirety. This PCT publication discloses, among other things, the selective attachment of water-soluble polymers to the APJ ligand.

[0150] In some embodiments, the polymer half-life extending moiety is polyethylene glycol (PEG), covalently linked at the N-terminus, C-terminus or at one or more intercalary side chains of the APJ agonist. In some embodiments the composition of matter can further include one or more PEG moieties conjugated to a non-PEG half-life extending moiety or to the APJ agonist, or to any combination of any of these. For example, an Fc domain or portion thereof can be made mono-PEGylated, di-PEGylated, or otherwise multi-PEGylated, by the process of covalent conjugation.

[0151] Covalent conjugation of proteins and peptides with poly(ethylene glycol) (PEG) can significantly extend the in vivo circulating half-lives. PEGylation is believed to achieve this effect predominately by retarding renal clearance, since the PEG moiety adds considerable hydrodynamic radius to the molecule. (Zalipsky, S., et al., Use of functionalized poly(ethylene glycol)s for modification of polypeptides., in poly(ethylene glycol) chemistry: Biotechnical and biomedical applications., J. M. Harris, Ed., Plenum Press: New York., 347-370 (1992)). Additional benefits often conferred by PEGylation of proteins and peptides include increased solubility, resistance to proteolytic degradation, and reduced immunogenicity of the therapeutic polypeptide. The merits of protein PEGylation are evidenced by the commercialization of several PEGylated proteins including PEG-Adenosine deaminase (Adagen™/Enzon Corp.), PEG-L-asparaginase (Oncaspar™/Enzon Corp.), PEG-Interferon α-2b (PEG-Intron™/Schering/Enzon), PEG-Interferon α-2a (PEGASYS™/Roche) and PEG-G-CSF (Neulasta™/Amgen) as well as many others in clinical trials.

[0152] By “PEGylated peptide”, “PEGylated polypeptide” or “PEGylated protein” is meant a peptide having a polyethylene glycol (PEG) moiety covalently bound to an amino acid residue of the peptide itself or to a peptidyl or non-peptidyl linker that is covalently bound to a residue of the peptide, either directly or indirectly through another linker moiety. A non-limiting example is N-terminal conjugation of the peptide with 3-(1-(1-bromo-2-oxo-6,9,12,15,18,21,24,27,30,33,36-undecaoxa-3-azaoctatriacontan-38-yl)-1H-1,2,3-triazol-4-yl)propanoyl (designated herein by the abbreviation “{bromoacetamide-PEG11-triazole}-”).

[0153] By “polyethylene glycol” or “PEG” is meant a polyalkylene glycol compound or a derivative thereof, with or without coupling agents or derivatization with coupling or activating moieties (e.g., with aldehyde, hydroxysuccinimidyl, hydrazide, thiol, triflate, tresylate, azirdine, oxirane, orthopyridyl disulphide, vinylsulfone, iodoacetamide or a maleimide moiety). In accordance with various embodiments, useful PEG includes substantially linear, straight chain PEG, branched PEG (brPEG), or dendritic PEG. (See, e.g., Merrill, U.S. Pat. No. 5,171,264; Harris et al., Multiarmed, monofunctional, polymer for coupling to molecules and surfaces, U.S. Pat. No. 5,932,462; Shen, N-maleimidyl polymer derivatives, U.S. Pat. No. 6,602,498).

[0154] Briefly, the PEG groups can generally be attached to the peptide portion of the composition via acylation or alkylation (or reductive amination) through a reactive group on the PEG moiety (e.g., an aldehyde, amino, thiol, or ester group) to a reactive group on the compound (e.g., an aldehyde, amino, or ester group). A useful strategy for the PEGylation of synthetic peptides consists of combining, through forming a conjugate linkage in solution, a peptide and a PEG moiety, each bearing a special functionality that is mutually reactive toward the other. The peptides can be easily prepared with conventional solid phase synthesis. The peptides can be “preactivated” with an appropriate functional group at a specific site. The precursors are purified and fully characterized prior to reacting with the PEG moiety. Ligation of the peptide with PEG usually takes place in aqueous phase and can be easily monitored by reverse phase analytical HPLC. The PEGylated peptides can be easily purified by preparative HPLC and characterized by analytical HPLC, amino acid analysis and laser desorption mass spectrometry.

[0155] PEG is a well-known, water soluble polymer that is commercially available or can be prepared by ring-opening polymerization of ethylene glycol according to methods well known in the art (Sandler and Karo, Polymer Synthesis, Academic Press, New York, Vol. 3, pages 138-161). In the application, the term “PEG” is used broadly to encompass any polyethylene glycol molecule, in mono-, bi-, or poly-functional form, without regard to size or to modification at an end of the PEG, and can be represented by the formula:

X—O(CH₂CH₂O)ₙ—R, (I)

where n is 3 to 2300 and X is H or a terminal modification, e.g., a methyl or C₁₋₄ alkyl, and R is the reactive moiety used for covalent attachment.

[0156] In some embodiments, a PEG can be used that terminates on one end with hydroxy or methoxy, i.e., X is H or CH₃ (“methoxy PEG”). It is noted that the other end of the PEG, which is shown in formula (I) terminating in R, covalently attaches to an activating moiety via an ether oxygen bond, an amine linkage, or amide linkage. When used in a chemical structure, the term “PEG” includes the formula (I) above without the hydrogen of the hydroxyl group shown, leaving the oxygen available to react with a free carbon atom of a linker to form an ether bond. More specifically, in order to conjugate PEG to a peptide, the peptide must be reacted with PEG in an “activated” form. Activated PEG can be represented by the formula:

(PEG)-(A) (II)

[0157] where PEG (defined supra) covalently attaches to a carbon atom of the activation moiety (A) to form an ether bond, an amine linkage, or amide linkage, and (A) contains a reactive group which can react with an amino, azido, alkyne, imino, maleimido, N-succinimidyl, carboxyl, aminooxy, seleno, or thiol group on an amino acid residue of a peptide or a linker moiety covalently attached to the peptide, e.g., the APJ agonist.

[0158] Examples of various PEG's are below.

[chemical structure]

[chemical structure]

[0159] Techniques for the preparation of activated PEG and its conjugation to biologically active peptides are well known in the art. (E.g., see U.S. Pat. Nos. 5,643,575, 5,919,455, 5,932,462, and 5,990,237; Kinstler et al., N-terminally chemically modified protein compositions and methods, U.S. Pat. Nos. 5,985,265, and 5,824,784; Thompson et al., PEGylation of polypeptides, EP 0575545 B1; Petit, Site specific protein modification, U.S. Pat. Nos. 6,451,986, and 6,548,644; S. Herman et al., Poly(ethylene glycol) with reactive endgroups: I. Modification of proteins, J. Bioactive Compatible Polymers, 10:145-187 (1995); Y. Lu et al., PEGylated peptides III: Solid-phase synthesis with PEGylating reagents of varying molecular weight: synthesis of multiply PEGylated peptides, Reactive Polymers, 22:221-229 (1994); A. M. Felix et al., PEGylated Peptides IV: Enhanced biological activity of site-directed PEGylated GRF analogs, Int. J. Peptide Protein Res., 46:253-264 (1995); A. M. Felix, Site-specific poly(ethylene glycol)ylation of peptides, ACS Symposium Series 680(poly(ethylene glycol)): 218-238 (1997); Y. Ikeda et al., Polyethylene glycol derivatives, their modified peptides, methods for producing them and use of the modified peptides, EP 0473084 B1; G. E. Means et al., Selected techniques for the modification of protein side chains, in: Chemical modification of proteins, Holden Day, Inc., 219 (1971)).

[0160] Activated PEG, such as PEG-aldehydes or PEG-aldehyde hydrates, can be chemically synthesized by known means or obtained from commercial sources, e.g., Shearwater Polymers, (Huntsville, Ala.) or Enzon, Inc. (Piscataway, N.J.).

[0161] An example of a useful activated PEG can be a PEG-aldehyde compound (e.g., a methoxy PEG-aldehyde), such as PEG-propionaldehyde, which is commercially available from Shearwater Polymers (Huntsville, Ala.). PEG-propionaldehyde is represented by the formula PEG-CH₂CH₂CHO. (See, e.g., U.S. Pat. No. 5,252,714). Also included within the meaning of “PEG aldehyde compound” are PEG aldehyde hydrates, e.g., PEG acetaldehyde hydrate and PEG bis aldehyde hydrate, which latter yields a bifunctionally activated structure. (See., e.g., Bentley et al., Poly(ethylene glycol) aldehyde hydrates and related polymers and applications in modifying amines, U.S. Pat. No. 5,990,237) (See., e.g., Bentley et al., Poly(ethylene glycol) aldehyde hydrates and related polymers and applications in modifying amines, U.S. Pat. No. 5,990,237). An activated multi-branched PEG-aldehyde compound can be used (PEG derivatives comprising multiple arms to give divalent, trivalent, tetravalent, octavalent constructs). Using a 4-arm PEG derivative four (4) APJ agonists can be attached to each PEG molecule. For example, the APJ agonist can be conjugated to a polyethylene glycol (PEG) at 1, 2, 3 or 4 amino functionalized sites of the PEG.

[0162] In being conjugated, the polyethylene glycol (PEG), as described herein, is covalently bound by alkylation of a thiol present in the peptide or is covalently bound by cycloaddition reaction between azido and alkyne moieties present in the PEG and peptide. Alternatively, the PEG can be covalently bound by reductive amination directly to at least one solvent-exposed free amine moiety of an amino acid residue of the APJ agonist itself. In some embodiments, the APJ agonist can be conjugated to a PEG at one or more primary or secondary amines on the peptide analog, or to two PEG groups at a single primary amine site on the peptide analog (e.g., this can occur when the reductive amination reaction involves the presence of excess PEG-aldehyde compound). It has been observed that when PEGylation by reductive amination is at a primary amine on the peptide, it is not uncommon to have amounts (1 to 100% range) of reaction product that have two or more PEGs present per molecule, and if the desired PEGylation product is one with only one PEG per molecule, then this “over-PEGylation” may be undesirable. When PEGylated product with a single PEG per PEGylation product molecule is desired, an embodiment can be employed that involves PEGylation using secondary amines of the pharmacologically active peptide, because only one PEG group per molecule will be transferred in the reductive amination reaction.

[0163] Amino acid residues that can provide a primary amine moiety include residues of lysine, homolysine, ornithine, α,β-diaminopropionic acid (Dap), a, 3-diaminopropionoic acid (Dpr), and α,γ-diaminobutyric acid (Dab), aminobutyric acid (Abu), and α-amino-isobutyric acid (Aib). The polypeptide N-terminus also provides a useful α-amino group for PEGylation Amino acid residues that can provide a secondary amine moiety include ε-N-alkyl lysine, α-N-alkyl lysine, δ-N-alkyl ornithine, α-N-alkyl ornithine, or an N-terminal proline, where the alkyl is C₁ to C₆.

[0164] Another useful activated PEG for generating the PEGylated analogs is a PEG-maleimide compound, such as, but not limited to, a methoxy PEG-maleimide, such as maleimido monomethoxy PEG, are particularly useful for generating PEG-conjugated peptides. (E.g., Shen, N-maleimidyl polymer derivatives, U.S. Pat. No. 6,602,498; C. Delgado et al., The uses and properties of PEG-linked proteins., Crit. Rev. Therap. Drug Carrier Systems, 9:249-304 (1992); S. Zalipsky et al., Use of functionalized poly(ethylene glycol)s for modification of polypeptides, in: Poly(ethylene glycol) chemistry: Biotechnical and biomedical applications (J. M. Harris, Editor, Plenum Press: New York, 347-370 (1992); S. Herman et al., Poly(ethylene glycol) with reactive endgroups: I. Modification of proteins, J. Bioactive Compatible Polymers, 10:145-187 (1995); P. J. Shadle et al., Conjugation of polymer to colony stimulating factor-1, U.S. Pat. No. 4,847,325; G. Shaw et al., Cysteine added variants IL-3 and chemical modifications thereof, U.S. Pat. No. 5,166,322 and EP 0469074 B1; G. Shaw et al., Cysteine added variants of EPO and chemical modifications thereof, EP 0668353 A1; G. Shaw et al., Cysteine added variants G-CSF and chemical modifications thereof, EP 0668354 A1; N. V. Katre et al., Interleukin-2 muteins and polymer conjugation thereof, U.S. Pat. No. 5,206,344; R. J. Goodson and N. V. Katre, Site-directed pegylation of recombinant interleukin-2 at its glycosylation site, Biotechnology, 8:343-346 (1990)).

[0165] A poly(ethylene glycol) vinyl sulfone is another useful activated PEG for generating the PEG-conjugated the APJ agonists by conjugation at thiolated amino acid residues, e.g., at C residues. (E.g., M. Morpurgo et al., Preparation and characterization of poly(ethylene glycol) vinyl sulfone, Bioconj. Chem., 7:363-368 (1996); see also Harris, Functionalization of polyethylene glycol for formation of active sulfone-terminated PEG derivatives for binding to proteins and biologically compatible materials, U.S. Pat. Nos. 5,446,090; 5,739,208; 5,900,461; 6,610,281 and 6,894,025; and Harris, Water soluble active sulfones of poly(ethylene glycol), WO 95/13312 A1). Another activated form of PEG that is useful in accordance with various embodiments, is a PEG-N-hydroxysuccinimide ester compound, for example, methoxy PEG-N-hydroxysuccinimidyl (NHS) ester.

[0166] Heterobifunctionally activated forms of PEG are also useful. (See, e.g., Thompson et al., PEGylation reagents and biologically active compounds formed therewith, U.S. Pat. No. 6,552,170).

[0167] In still other embodiments of producing a composition of matter, the APJ agonist is reacted by known chemical techniques with an activated PEG compound, such as but not limited to, a thiol-activated PEG compound, a diol-activated PEG compound, a PEG-hydrazide compound, a PEG-oxyamine compound, or a PEG-bromoacetyl compound. (See, e.g., S. Herman, Poly(ethylene glycol) with Reactive Endgroups: I. Modification of Proteins, J. Bioactive and Compatible Polymers, 10:145-187 (1995); S. Zalipsky, Chemistry of Polyethylene Glycol Conjugates with Biologically Active Molecules, Advanced Drug Delivery Reviews, 16:157-182 (1995); R. Greenwald et al., Polyethylene glycol) conjugated drugs and prodrugs: a comprehensive review, Critical Reviews in Therapeutic Drug Carrier Systems, 17:101-161 (2000)).

[0168] In another embodiment the activated PEG for generating a PEG-conjugated APJ agonist can be a multivalent PEG having more than one activated residues. Multivalent PEG moieties can include, but are not limited to, those shown below in Table 4:

TABLE 4
Multivalent PEG

[chemical structure]

[chemical structure]

[chemical structure]

[chemical structure]

[chemical structure]

[chemical structure]

[0169] In still other embodiments the APJ agonist can be reacted by known chemical techniques with an activated multi-branched PEG compound (PEG derivatives comprising multiple arms to give divalent, trivalent, tetravalent, octavalent constructs), such as but not limited to, pentaerythritol tetra-polyethyleneglycol ether. Functionalization and activated derivatives, such as, but not limited to, N-succinimidyloxycarbonyl)propyl, p-nitrophenyloxycarbonyl, (—CO₂-p-C₆H₄NO₂), 3-(N-maleimido)propanamido, 2-sulfanylethyl, and 3-aminopropyl. Using a 4-arm PEG derivative, four peptide analogs can be attached to each PEG molecule. For example, the APJ agonist can be conjugated to a polyethylene glycol (PEG) at:

[0170] (a) 1, 2, 3 or 4 amino functionalized sites of the PEG;

[0171] (b) 1, 2, 3 or 4 thiol functionalized sites of the PEG;

[0172] (c) 1, 2, 3 or 4 maleimido functionalized sites of the PEG;

[0173] (d) 1, 2, 3 or 4 N-succinimidyl functionalized sites of the PEG;

[0174] (e) 1, 2, 3 or 4 carboxyl functionalized sites of the PEG;

[0175] (f) 1, 2, 3 or 4 p-nitrophenyloxycarbonyl functionalized sites of the PEG;

[0176] (g) 1, 2, 3 or 4 azido functionalized sites of the PEG;

[0177] (h) 1, 2, 3 or 4 alkene or alkyne functionalized sites of the PEG; or

[0178] (i) 1, 2, 3 or 4 halide or halide-acetylamide functionalized sites of the PEG.

[0179] The smallest practical size of PEG is about 500 Daltons (Da), below which PEG becomes toxic. Above about 500 Da, any molecular mass for a PEG can be used as practically desired, e.g., from about 500 Daltons (Da) to 100,000 Da (n is 10 to 2300). The number of PEG monomers (n) is approximated from the average molecular mass using a MW=44 Da for each monomer. In some embodiments, the combined or total average molecular mass of PEG used in a PEG-conjugated APJ agonist can be from about 500 Da to 10,000 Da (total n is from 10 to 230), or from about 10,000 to 40,000 Da (total n is from 230 to 910), or from about 40,000 to 100,000 Da (total n is from 910 to 2300).

[0180] In various other embodiments, the combined molecular mass of the PEG molecule should not exceed about 100,000 Da. In some embodiments, the combined or total average molecular mass of PEG used in a PEG-conjugated APJ agonist can be from about 3,000 Da to 60,000 Da (total n is from 70 to 1,400), from about 10,000 Da to 40,000 Da (total n is about 230 to about 910). In other embodiments the combined mass for PEG is from about 20,000 Da to 30,000 Da (total n is about 450 to about 680).

[0181] It will be appreciated that “multimers” of the composition of matter can be made, since the half-life extending moiety employed for conjugation of the APJ agonist (with or without an intervening linker moiety) can be multivalent (e.g., bivalent, trivalent, tetravalent or a higher order valency) as to the number of amino acid residues at which the half-life extending moiety can be conjugated. In some embodiments the peptide can be multivalent (e.g., bivalent, trivalent, tetravalent or a higher order valency), and, thus, some “multimers” may have more than one half life extending moiety. Consequently, it is possible to produce a variety of conjugated half-life extending moiety peptide structures. By way of example, a univalent half-life extending moiety and a univalent peptide can produce a 1:1 conjugate; a bivalent peptide and a univalent half-life extending moiety may form conjugates wherein the peptide conjugates bear two half-life extending moiety moieties, whereas a bivalent half-life extending moiety and a univalent peptide may produce species where two peptide entities are linked to a single half-life extending moiety; use of higher-valence half-life extending moiety can lead to the formation of clusters of peptide entities bound to a single half-life extending moiety, whereas higher-valence peptides may become encrusted with a plurality of half-life extending moiety moieties. By way of further example, if the site of conjugation of a multivalent half-life extending moiety to the APJ agonist is a cysteine or other aminothiol the methods disclosed by D'Amico et al. may be employed (D'Amico et al., Method of conjugating aminothiol containing molecules to vehicles, published as US 2006/0199812, which application is incorporated herein by reference in its entirety).

[0182] The peptide moieties may have more than one reactive group which will react with the activated half-life extending moiety and the possibility of forming complex structures must always be considered; when it is desired to form simple structures such as 1:1 adducts of half-life extending moiety and peptide, or to use bivalent half-life extending moiety to form peptide:half-life extending moiety:peptide adducts, it will be beneficial to use predetermined ratios of activated half-life extending moiety and peptide material, predetermined concentrations thereof and to conduct the reaction under predetermined conditions (such as duration, temperature, pH, etc.) so as to form a proportion of the described product and then to separate the described product from the other reaction products. The reaction conditions, proportions and concentrations of the reagents can be obtained by relatively simple trial-and-error experiments which are within the ability of an ordinarily skilled artisan with appropriate scaling-up as necessary. Purification and separation of the products is similarly achieved by conventional techniques well known to those skilled in the art.

[0183] Additionally, physiologically acceptable salts of the half-life extending moiety-fused or conjugated to the APJ agonist are also encompassed by various embodiments described within.

[0184] The above-described half-life extending moieties and other half-life extending moieties described herein are useful, either individually or in combination, and as further described in the art, for example, in Sullivan et al., Toxin Peptide Therapeutic Agents, US2007/0071764 and Sullivan et al., Toxin Peptide Therapeutic Agents, PCT/US2007/022831, published as WO 2008/088422, which are both incorporated herein by reference in their entireties. Various embodiments encompass the use of any single species of pharmaceutically acceptable half-life extending moiety, such as, but not limited to, those described herein, in conjugation with the peptide analog, or the use of a combination of two or more like or different half-life extending moieties.

[0185] A “linker” or “linker moiety” is optional in the polypeptides and/or compositions of matter described herein. When present, its chemical structure is not critical, since it serves primarily as a means of covalent attachment of the APJ agonist to a vehicle. The linker, e.g., may consist of a thioether, amine, imine, amide, triazole, disulfide, or a carbon-carbon bond. Thus, in various embodiments, e.g. a thioether can tether the vehicle to APJ agonist.

[0186] The “linker” or “linker moiety” can be a biologically acceptable peptidyl or non-peptidyl organic group that is covalently bound to an amino acid residue of an APJ agonist or other polypeptide chain (e.g., an immunoglobulin HC or LC or immunoglobulin Fc domain) contained in a composition, which linker moiety covalently joins or conjugates the peptide analog or other polypeptide chain to another peptide or polypeptide chain in the composition, or to a half-life extending moiety. In some embodiments, a half-life extending moiety, as described herein, is conjugated, i.e., covalently bound directly to an amino acid residue of the APJ agonist itself, or optionally, to a peptidyl or non-peptidyl linker moiety (including but not limited to aromatic or aryl linkers) that is covalently bound to an amino acid residue of the peptide analog. The presence of any linker moiety is optional. When present, its chemical structure is not critical, since it serves primarily as a spacer to position, join, connect, or optimize presentation or position of one functional moiety in relation to one or more other functional moieties of a molecule in various embodiments.

[0187] The presence of a linker moiety can be useful in optimizing pharamcologial activity of some embodiments. The linker may be made up of amino acids linked together by peptide bonds. The linker moiety, if present, can be independently the same or different from any other linker, or linkers, that may be present in the composition. As stated above, the linker moiety, if present (whether within the primary amino acid sequence of the peptide analog, or as a linker for attaching a half-life extending moiety to the peptide analog), can be “peptidyl” in nature (i.e., made up of amino acids linked together by peptide bonds) and made up in length, preferably, of from 1 up to about 40 amino acid residues, of from 1 up to about 20 amino acid residues, or from 1 to about 10 amino acid residues. The amino acid residues in the linker are from among the twenty canonical amino acids, e.g., cysteine, glycine, alanine, proline, asparagine, glutamine, and/or serine. In various embodiments, a peptidyl linker can be made up of a majority of amino acids that are sterically unhindered, such as glycine, serine, and alanine linked by a peptide bond. It may also be desirable that, if present, a peptidyl linker be selected that avoids rapid proteolytic turnover in circulation in vivo. Some of these amino acids may be glycosylated, as is well understood by those in the art. For example, a useful linker sequence constituting a sialylation site is X₁X₂NX₄X₅G (SEQ ID NO: 76), wherein X₁, X₂, X₄ and X₅ are each independently any amino acid residue. It may also be desirable that, if present, a peptidyl linker can consist of any non-canonical amino acids or a combination of non-canonical and canonical amino acids selected to avoid or reduce rapid proteolytic turnover in vitro and/or in vivo.

[0188] In other embodiments, the 1 to 40 amino acids of the peptidyl linker moiety can be selected from glycine, alanine, proline, asparagine, glutamine, and lysine. A linker can be made up of a majority of amino acids that are sterically unhindered, such as glycine and alanine. Thus, linkers can include polyglycines, polyserines, and polyalanines, or combinations of any of these. Some exemplary peptidyl linkers are poly(Gly)₁₋₈ (SEQ ID NO: 77), particularly (Gly)₃ (SEQ ID NO: 78), (Gly)₄ (SEQ ID NO: 79), (Gly)₅ (SEQ ID NO: 80) and (Gly)₇ (SEQ ID NO: 81), as well as, GlySer and poly(Gly)₄Ser (SEQ ID NO: 82), such as “L15” (GGGGSGGGGSGGGGS; SEQ ID NO: 83), poly(Gly-Ala)₂₄ (SEQ ID NO: 62) and poly(Ala)₁₋₈ (SEQ ID NO: 84). Other specific examples of peptidyl linkers include (Gly)₅Lys (SEQ ID NO: 85), and (Gly)₅LysArg (SEQ ID NO: 86). Other examples of useful peptidyl linkers are: Other examples of useful peptidyl linkers are:

(SEQ ID NO: 87)
(Gly)₃Lys(Gly)₄;
(SEQ ID NO: 88)
(Gly)₃AsnGlySer(Gly)₂;
(SEQ ID NO: 89)
(Gly)₃Cys(Gly)₄;
and
(SEQ ID NO: 90)
GlyProAsnGlyGly.

[0189] To explain the above nomenclature, for example, (Gly)₃Lys(Gly)₄ (SEQ ID NO: 91) means Gly-Gly-Gly-Lys-Gly-Gly-Gly-Gly (SEQ ID NO: 91). Other combinations of Gly and Ala are also useful.

[0190] Other linkers are those identified herein as “L5” (GGGGS; or “G₄S”; SEQ ID NO: 92), “L10” (GGGGSGGGGS; SEQ ID NO: 93); “L20” (GGGGSGGGGSGGGGSGGGGS; SEQ ID NO: 94); “L25” (GGGGSGGGGSGGGGSGGGGSGGGGS; SEQ ID NO: 95) and any linkers used in the working examples hereinafter.

[0191] In some embodiments which comprise a peptide linker moiety, acidic residues, for example, glutamate or aspartate residues are placed in the amino acid sequence of the linker moiety. Examples include the following peptide linker sequences:

(SEQ ID NO: 96)
GGEGGG;
(SEQ ID NO: 97)
GGEEEGGG;
(SEQ ID NO: 98)
GEEEG;
(SEQ ID NO: 99)
GEEE;
(SEQ ID NO: 100)
GGDGGG;
(SEQ ID NO: 101)
GGDDDGG;
(SEQ ID NO: 102)
GDDDG;
(SEQ ID NO: 103)
GDDD;
(SEQ ID NO: 1412)
GGGGSDDSDEGSDGEDGGGGS;
(SEQ ID NO: 104)
WEWEW;
(SEQ ID NO: 105)
FEFEF;
(SEQ ID NO: 106)
EEEWWW;
(SEQ ID NO: 107)
EEEFFF;
(SEQ ID NO: 108)
WWEEEWW;
or
(SEQ ID NO: 109)
FFEEEFF.

[0192] In other embodiments, the linker constitutes a phosphorylation site, e.g., X₁X₂YX₄X₅G (SEQ ID NO: 110), wherein X₁, X₂, X₄, and X₅ are each independently any amino acid residue; X₁X₂SX₄X₅G (SEQ ID NO: 111), wherein X₁, X₂, X₄ and X₅ are each independently any amino acid residue; or X₁X₂TX₄X₅G (SEQ ID NO: 112), wherein X₁, X₂, X₄ and X₅ are each independently any amino acid residue.

[0193] The linkers shown here are exemplary; peptidyl linkers may be much longer and may include other residues. A peptidyl linker can contain, e.g., a cysteine, another thiol, or nucleophile for conjugation with a half-life extending moiety. In another embodiment, the linker can contain a cysteine or homocysteine residue, or other 2-amino-ethanethiol or 3-amino-propanethiol moiety for conjugation to maleimide, iodoacetaamide or thioester, functionalized half-life extending moiety.

[0194] Another useful peptidyl linker is a large, flexible linker comprising a random Gly/Ser/Thr sequence, for example: GSGSATGGSGSTASSGSGSATH (SEQ ID NO: 113) or HGSGSATGGSGSTASSGSGSAT (SEQ ID NO: 114), that is estimated to be about the size of a 1 kDa PEG molecule. Alternatively, a useful peptidyl linker may be comprised of amino acid sequences known in the art to form rigid helical structures (e.g., Rigid linker: -AEAAAKEAAAKEAAAKAGG (SEQ ID NO: 115). Additionally, a peptidyl linker can also comprise a non-peptidyl segment such as a 6 carbon aliphatic molecule of the formula —CH₂—CH₂—CH₂—CH₂—CH₂—CH₂—. The peptidyl linkers can be altered to form derivatives as described herein.

[0195] Optionally, a non-peptidyl linker moiety is also useful for conjugating the half-life extending moiety to the peptide portion of the half-life extending moiety-conjugated peptide. For example, alkyl linkers such as —NH—(CH₂)ₛ—C(O)—, wherein s=2-20 can be used. These alkyl linkers may further be substituted by any non-sterically hindering group such as lower alkyl (e.g., C₁-C₆) lower acyl, halogen (e.g., Cl, Br), CN, NH₂, phenyl, etc. Exemplary non-peptidyl linkers are PEG linkers (e.g., shown below):

[chemical structure]

wherein n is such that the linker has a molecular weight of about 100 to about 5000 Daltons (Da).

[0196] The linker could also be a unnatural amino acid, such as aminohenxanoic acid, or an organic group, such as a dicarbohylic acid, such as succinic acid (butanedioic acid).

[chemical structure]

[0197] In one embodiment, the non-peptidyl linker is aryl. The linkers may be altered to form derivatives in the same manner as described herein. In addition, PEG moieties may be attached to the N-terminal amine or selected side chain amines by either reductive alkylation using PEG aldehydes or acylation using hydroxysuccinimido or carbonate esters of PEG, or by thiol conjugation.

[0198] “Aryl” is phenyl or phenyl vicinally-fused with a saturated, partially-saturated, or unsaturated 3-, 4-, or 5 membered carbon bridge, the phenyl or bridge being substituted by 0, 1, 2 or 3 substituents selected from C₁₋₈ alkyl, C₁₋₄ haloalkyl or halo. “Heteroaryl” is an unsaturated 5, 6 or 7 membered monocyclic or partially-saturated or unsaturated 6-, 7-, 8-, 9-, 10- or 11 membered bicyclic ring, wherein at least one ring is unsaturated, the monocyclic and the bicyclic rings containing 1, 2, 3 or 4 atoms selected from N, O and S, wherein the ring is substituted by 0, 1, 2 or 3 substituents selected from C₁₋₈ alkyl, C₁₋₄ haloalkyl and halo. Non-peptide portions, such as non-peptidyl linkers or non-peptide half-life extending moieties can be synthesized by conventional organic chemistry reactions.

[0199] The above is merely illustrative and not an exhaustive treatment of the kinds of linkers that can optionally be employed in accordance with various embodiments.

[0200] Various embodiments also relate to the use of one or more of the described compositions of matter in the manufacture of a medicament for the treatment or prevention of a disease, disorder, or other medical condition, for example, cardiac disorders. The cardiac disorders can comprise, for example, any disorder affecting contractility of the heart or other heart functions. Additionally, various embodiments relate to any form of heart disease, e.g. hypertrophy, hypertension, heart failure, congestive heart failure or cardiomyopathy. The heart failure can be congestive heart failure. Other embodiments concern the use of APJ agonists described herein to treat disorders of the heart resulting from hypertension including pulmonary arterial hypertension cancer, diabetes, obesity, metastatic diseases and HIV. Other embodiments concern the use of APJ agonists for the treatment or prevention of various other disorders or diseases, such as but not limited to treatment of disorders associated with lipid and glucose metabolism, disorders associated with regulation and function of the GI tract, protection against HIV cell entry, and protection from cell apoptosis.

[0201] Pharmaceutical compositions can be configured for administration to a patient by a wide variety of delivery routes, e.g., an intravascular delivery route such as by injection or infusion, subcutaneous (“s.c.”), intravenous (“i.v.”), intramuscular, intraperitoneal (“i.p.”), epidural, or intrathecal delivery routes, or for oral, enteral, pulmonary (e.g., inhalant), intranasal, transmucosal (e.g., sublingual administration), transdermal or other delivery routes and/or forms of administration known in the art. Delivery of a drug or pharmaceutical composition containing and APJ agonist, may take place via standard injectable modalities, whether self-administered using prefilled syringes or in hospital setting, or also via a delivery pump such as an autoinjector, a patch pump or large volume injector to achieve the most accurate dosing and the most stable plasma exposure levels. The pharmaceutical compositions may be prepared in liquid form, or may be in dried powder form, such as lyophilized form, or crystalline form. For oral or enteral use, the pharmaceutical compositions can be configured, for example, as tablets, troches, lozenges, aqueous or oily suspensions, dispersible powders or granules, emulsions, hard or soft capsules, syrups, elixirs or enteral formulas.

[0202] In general, various embodiments provide pharmaceutical compositions comprising an APJ agonist and a pharmaceutically acceptable carrier. Such pharmaceutical compositions can be configured for administration to a patient by a wide variety of delivery routes, e.g., an intravascular delivery route such as by injection or infusion, subcutaneous, intramuscular, intraperitoneal, epidural, or intrathecal delivery routes, or for oral, enteral, pulmonary (e.g., inhalant), intranasal, transmucosal (e.g., sublingual administration), transdermal or other delivery routes and/or forms of administration known in the art. The pharmaceutical compositions may be prepared in liquid form, or may be in dried powder form, such as lyophilized form. For oral or enteral use, the pharmaceutical compositions can be configured, for example, as tablets, troches, lozenges, aqueous or oily suspensions, dispersible powders or granules, emulsions, hard or soft capsules, syrups, elixirs or enteral formulas.

[0203] Enhanced pharmaceutical properties can refer to molecules with improved pharmacokinetics, pharmacodynamics and/or improved dosing frequency for drug efficacy, e.g. not every few hours.

[0204] In the practice, the “pharmaceutically acceptable carrier” can be any physiologically tolerated substance known to those of ordinary skill in the art useful in formulating pharmaceutical compositions, including, any pharmaceutically acceptable diluents, excipients, dispersants, binders, fillers, glidants, anti-frictional agents, compression aids, tablet-disintegrating agents (disintegrants), suspending agents, lubricants, flavorants, odorants, sweeteners, permeation or penetration enhancers, preservatives, surfactants, solubilizers, emulsifiers, thickeners, adjuvants, dyes, coatings, encapsulating material(s), and/or other additives singly or in combination. Such pharmaceutical compositions can include diluents of various buffer content (e.g., Tris-HCl, acetate, phosphate), pH and ionic strength; additives such as detergents and solubilizing agents (e.g., Tween® 80, Polysorbate 80), anti-oxidants (e.g., ascorbic acid, sodium metabisulfite), preservatives (e.g., Thimersol®, benzyl alcohol) and bulking substances (e.g., lactose, mannitol); incorporation of the material into particulate preparations of polymeric compounds such as polylactic acid, polyglycolic acid, etc. or into liposomes. Hyaluronic acid can also be used, and this can have the effect of promoting sustained duration in the circulation. Such compositions can influence the physical state, stability, rate of in vivo release, and rate of in vivo clearance of the present proteins and derivatives. See, e.g., Remington's Pharmaceutical Sciences, 18th Ed. (1990, Mack Publishing Co., Easton, Pa. 18042) pages 1435-1712, which are herein incorporated by reference in their entirety. The compositions can be prepared in liquid form, or can be in dried powder, such as lyophilized form. Implantable sustained release formulations are also useful, as are transdermal or transmucosal formulations. Additionally (or alternatively), various embodiments provide compositions for use in any of the various slow or sustained release formulations or microparticle formulations known to the skilled artisan, for example, sustained release microparticle formulations, which can be administered via pulmonary, intranasal, or subcutaneous delivery routes. (See, e.g., Murthy et al., Injectable compositions for the controlled delivery of pharmacologically active compound, U.S. Pat. No. 6,887,487; Manning et al., Solubilization of pharmaceutical substances in an organic solvent and preparation of pharmaceutical powders using the same, U.S. Pat. Nos. 5,770,559 and 5,981,474; Lieberman et al., Lipophilic complexes of pharmacologically active inorganic mineral acid esters of organic compounds, U.S. Pat. No. 5,002,936; Gen, Formative agent of protein complex, US 2002/0119946 A1; Goldenberg et al., Sustained release formulations, WO 2005/105057 A1).

[0205] One can dilute the compositions or increase the volume of the pharmaceutical compositions with an inert material. Such diluents can include carbohydrates, especially, mannitol, α-lactose, anhydrous lactose, cellulose, sucrose, modified dextrans and starch. Certain inorganic salts may also be used as fillers, including calcium triphosphate, magnesium carbonate and sodium chloride. Some commercially available diluents are Fast-Flo, Emdex, STA-Rx 1500, Emcompress and Avicell.

[0206] A variety of conventional thickeners are useful in creams, ointments, suppository and gel configurations of the pharmaceutical composition, such as, but not limited to, alginate, xanthan gum, or petrolatum, may also be employed in various configurations of the pharmaceutical composition.

[0207] In various embodiments, liquid pharmaceutical compositions that are sterile solutions or suspensions can be administered to a patient by injection, for example, intramuscularly, intrathecally, epidurally, intravascularly (e.g., intravenously or intraarterially), intraperitoneally or subcutaneously. (See, e.g., Goldenberg et al., Suspensions for the sustained release of proteins, U.S. Pat. No. 6,245,740 and WO 00/38652 A1). Sterile solutions can also be administered by intravenous infusion. The composition can be included in a sterile solid pharmaceutical composition, such as a lyophilized powder, which can be dissolved or suspended at a convenient time before administration to a patient using sterile water, saline, buffered saline or other appropriate sterile injectable medium.

[0208] Implantable sustained release formulations are also useful embodiments of the pharmaceutical compositions. For example, the pharmaceutically acceptable carrier, being a biodegradable matrix implanted within the body or under the skin of a human or non-human vertebrate, can be a hydrogel similar to those described above. Alternatively, it may be formed from a poly-alpha-amino acid component. (Sidman, Biodegradable, implantable drug delivery device, and process for preparing and using same, U.S. Pat. No. 4,351,337). Other techniques for making implants for delivery of drugs are also known and useful.

[0209] In powder forms, the pharmaceutically acceptable carrier is a finely divided solid, which is in admixture with finely divided active ingredient(s), including the composition. For example, in some embodiments, a powder form is useful when the pharmaceutical composition is configured as an inhalant. (See, e.g., Zeng et al., Method of preparing dry powder inhalation compositions, WO 2004/017918; Trunk et al., Salts of the CGRP antagonist BIBN4096 and inhalable powdered medicaments containing them, U.S. Pat. No. 6,900,317).

[0210] One can dilute or increase the volume of the compound with an inert material. These diluents could include carbohydrates, especially mannitol, α-lactose, anhydrous lactose, cellulose, sucrose, modified dextrans and starch. Certain inorganic salts can also be used as fillers including calcium triphosphate, magnesium carbonate and sodium chloride. Some commercially available diluents are Fast-Flo™, Emdex™, STA-Rx™ 1500, Emcompress™ and Avicell™.

[0211] Binders can be used to hold the therapeutic agent together to form a hard tablet and include materials from natural products such as acacia, tragacanth, starch and gelatin. Others include methyl cellulose (MC), ethyl cellulose (EC) and carboxymethyl cellulose (CMC). Polyvinyl pyrrolidone (PVP) and hydroxypropylmethyl cellulose (HPMC) could both be used in alcoholic solutions to granulate the therapeutic. An antifrictional agent can be included in the formulation of the therapeutic to prevent sticking during the formulation process. Lubricants can be used as a layer between the therapeutic and the die wall, and these can include but are not limited to; stearic acid including its magnesium and calcium salts, polytetrafluoroethylene (PTFE), liquid paraffin, vegetable oils and waxes. Soluble lubricants can also be used such as sodium lauryl sulfate, magnesium lauryl sulfate, polyethylene glycol of various molecular weights, Carbowax 4000 and 6000.

[0212] Also useful in various embodiments are oral dosage forms. If necessary, the composition can be chemically modified so that oral delivery is efficacious. Generally, the chemical modification contemplated is the attachment of at least one moiety to the molecule itself, where said moiety permits (a) inhibition of proteolysis; and (b) uptake into the blood stream from the stomach or intestine. Also desired is the increase in overall stability of the compound and increase in circulation time in the body. Moieties useful as covalently attached half-life extending moieties can also be used for this purpose. Examples of such moieties include: PEG, copolymers of ethylene glycol and propylene glycol, carboxymethyl cellulose, dextran, polyvinyl alcohol, polyvinyl pyrrolidone and polyproline. See, for example, Abuchowski and Davis (1981), Soluble Polymer-Enzyme Adducts, Enzymes as Drugs (Hocenberg and Roberts, eds.), Wiley-Interscience, New York, N.Y., pp 367-83; Newmark, et al. (1982), J. Appl. Biochem. 4:185-9. Other polymers that could be used are poly-1,3-dioxolane and poly-1,3,6-tioxocane. Preferred for pharmaceutical usage, as indicated above, are PEG moieties.

[0213] For oral delivery dosage forms, it is also possible to use a salt of a modified aliphatic amino acid, such as sodium N-(8-[2-hydroxybenzoyl]amino) caprylate (SNAC), as a carrier to enhance absorption of the therapeutic compounds. The clinical efficacy of a heparin formulation using SNAC has been demonstrated in a Phase II trial conducted by Emisphere Technologies. See U.S. Pat. No. 5,792,451, “Oral drug delivery composition and methods.”

[0214] In one embodiment, the pharmaceutically acceptable carrier can be a liquid and the pharmaceutical composition is prepared in the form of a solution, suspension, emulsion, syrup, elixir or pressurized composition. The active ingredient(s) (e.g., the composition of matter) can be dissolved, diluted or suspended in a pharmaceutically acceptable liquid carrier such as water, an organic solvent, a mixture of both, or pharmaceutically acceptable oils or fats. The liquid carrier can contain other suitable pharmaceutical additives such as detergents and/or solubilizers (e.g., Tween 80, Polysorbate 80), emulsifiers, buffers at appropriate pH (e.g., Tris-HCl, acetate, phosphate), adjuvants, anti-oxidants (e.g., ascorbic acid, sodium metabisulfite), preservatives (e.g., Thimersol, benzyl alcohol), sweeteners, flavoring agents, suspending agents, thickening agents, bulking substances (e.g., lactose, mannitol), colors, viscosity regulators, stabilizers, electrolytes, osmolutes or osmo-regulators. Additives can also be included in the formulation to enhance uptake of the composition. Additives potentially having this property are for instance the fatty acids oleic acid, linoleic acid and linolenic acid.

[0215] Also useful are oral solid dosage forms, which are described generally in Remington's Pharmaceutical Sciences (1990), supra, in Chapter 89, which is hereby incorporated by reference in its entirety. Solid dosage forms include tablets, capsules, pills, troches or lozenges, cachets or pellets. Also, liposomal or proteinoid encapsulation can be used to formulate the present compositions (as, for example, proteinoid microspheres reported in U.S. Pat. No. 4,925,673). Liposomal encapsulation can be used and the liposomes can be derivatized with various polymers (e.g., U.S. Pat. No. 5,013,556). A description of possible solid dosage forms for the therapeutic is given in Marshall, K., Modern Pharmaceutics (1979), edited by G. S. Banker and C. T. Rhodes, in Chapter 10, which is hereby incorporated by reference in its entirety. In general, the formulation will include the compound, and inert ingredients that allow for protection against the stomach environment, and release of the biologically active material in the intestine.

[0216] In tablet form, the active ingredient(s) are mixed with a pharmaceutically acceptable carrier having the necessary compression properties in suitable proportions and compacted in the shape and size desired.

[0217] The powders and tablets can contain up to 99% of the active ingredient(s). Suitable solid carriers include, for example, calcium phosphate, magnesium stearate, talc, sugars, lactose, dextrin, starch, gelatin, cellulose, polyvinylpyrrolidine, low melting waxes and ion exchange resins.

[0218] Controlled release formulation can be desirable. In various embodiments the composition can be incorporated into an inert matrix that permits release by either diffusion or leaching mechanisms e.g., gums. Slowly degenerating matrices can also be incorporated into the formulation, e.g., alginates, polysaccharides. Another form of a controlled release of the compositions is by a method based on the Oros™ therapeutic system (Alza Corp.), i.e., the drug is enclosed in a semipermeable membrane which allows water to enter and push drug out through a single small opening due to osmotic effects. Some enteric coatings also have a delayed release effect.

[0219] Pulmonary delivery of the compositions may also be useful. The protein (or derivative) is delivered to the lungs of a mammal while inhaling and traverses across the lung epithelial lining to the blood stream. (Other reports of this include Adjei et al., Pharma. Res. (1990) 7: 565-9; Adjei et al. (1990), Internatl. J. Pharmaceutics 63: 135-44 (leuprolide acetate); Braquet et al. (1989), J. Cardiovasc. Pharmacol. 13 (suppl.5): s.143-146 (endothelin-1); Hubbard et al. (1989), Annals Int. Med. 3: 206-12 (α1-antitrypsin); Smith et al. (1989), J. Clin. Invest. 84: 1145-6 (α1-proteinase); Oswein et al. (March 1990), “Aerosolization of Proteins,” Proc. Symp. Resp. Drug Delivery II, Keystone, Colorado (recombinant human growth hormone); Debs et al. (1988), J. Immunol. 140: 3482-8 (interferon-γ and tumor necrosis factor α) and Platz et al., U.S. Pat. No. 5,284,656 (granulocyte colony stimulating factor).

[0220] The dosage regimen involved in a method for treating a condition will be determined by the attending physician, considering various factors which modify the action of drugs, e.g. the age, condition, body weight, sex and diet of the patient, the severity of any infection, time of administration and other clinical factors. Generally, the daily regimen should be in the range of 0.1-1000 micrograms of the compound per kilogram of body weight, preferably 0.1-150 micrograms per kilogram.

[0221] By way of further illustration, the following numbered embodiments are presented:

[0222] 1. An APJ agonist having increased stability relative to wild type Apelin-13 (SEQ ID NO:2), wherein the agonist is modified with a half-life prolonging group at the N-terminus or C-terminus or other residue of the agonist and at least one amino acid is replaced with a non-canonical amino acid.

[0223] In various embodiments the APJ agonist of Embodiment 1 may not have a half-life prolonging group (e.g. PEG or Fc), but will still have increased stability and at least 3, 4, 5, 6, 7 or 8 non-canonical amino acid substitutions or added amino acids to Apelin-13.

[0224] 2. The APJ agonist of Embodiment 1, wherein the half-life prolonging group is selected from the group consisting of PEG, an Fc domain, IgG, HSA, PE, an Ab, a peptide, a lipid, poly(O-2-hydroxyethyl) starch (HES), and a nanostructure.

[0225] 3. The APJ agonist of Embodiment 1 wherein the agonist is pyroglutamated at the N-terminus and is optionally PEGylated elsewhere in the agonist.

[0226] 4. The APJ agonist of Embodiment 1 wherein at least 2 amino acid residues are replaced with a non-canonical amino acid.

[0227] 5. The APJ agonist of Embodiment 4 wherein the at least 2 amino acid residues are 3, 4 or 5 amino acid residues.

[0228] 6. The APJ agonist of Embodiment 1 wherein the increased stability is an increased in vitro half-life.

[0229] 7. The APJ agonist of Embodiment 1 that binds to the APJ receptor.

[0230] 8. The APJ agonist of Embodiment 1 wherein the agonist is PEGylated with thiopropionyl(20K-mPEG), Atz(PEG10), NPeg11 or Atz(20K-mPEG).

[0231] 9. An APJ agonist having increased potency relative to wild type Apelin-13 (SEQ ID NO:2), wherein the agonist is modified with a half-life prolonging group at the N-terminus, C-terminus or elsewhere with the agonist and at least one amino acid is replaced with a non-canonical amino acid.

[0232] 10. The agonist of Embodiment 9, wherein the half-life prolonging group is selected from the group consisting of PEG, an Fc domain, IgG, HAS, PE, an Ab, a peptide, a lipid, poly(O-2-hydroxyethyl) starch (HES), and a nanostructure.

[0233] 11. The APJ agonist of Embodiment 9 wherein at least 2 amino acid residues are replaced with a non-canonical amino acid.

[0234] 12. The APJ agonist of Embodiment 11 wherein the at least 2 amino acid residues are 3, 4 or 5 amino acid residues.

[0235] 13. The APJ agonist of Embodiment 9 that binds to the APJ receptor.

[0236] 14. The APJ agonist of Embodiment 9 wherein the agonist is PEGylated with thiopropionyl(20K-mPEG), Atz(PEG10), NPeg11 or Atz(20K-mPEG).

[0237] 15. An isolated polypeptide comprising the amino acid sequence:

(SEQ ID NO: 116)
[z]KFRRQRP[hArg]X₁X₂X₃KGX₄[Nle]PX₅,

[0238] a. wherein z is PE, PEG, or a half-life prolonging derivative attached via a linker or the derivative may be attached with no linker,
[0239] b. X₁ is [Cha] or [NMeLeu],
[0240] c. X₂ is S with or without a PEG or a half-life prolonging derivative wherein the derivative is attached with or without a linker,
[0241] d. X₃ is H with or without a PEG or a half-life prolonging derivative wherein the derivative is attached with or without a linker,
[0242] e. X₄ is P or [Oic], or other secondary amino acid and
[0243] f. X₅ is F, [4-Cl—F], an aliphatic or aromatic amino acid or is absent.

[0244] 16. The isolated polypeptide of Embodiment 15 comprising the amino acid sequence: [z]KFRRQRP[hArg][Cha]SHKG[Oic][Nle]P[4-Cl—F] (SEQ ID NO: 117), wherein z is PE or PEG.

[0245] 17. The isolated polypeptide of Embodiment 15 wherein z is thiopropionyl(20K-mPEG).

[0246] 18. An isolated polypeptide comprising the amino acid sequence: [z]RP[hArg]X₁X₂X₃KGX₄[Nle]PX₅ (SEQ ID NO: 118) wherein:
[0247] a) z is Q, L, V, I, F, Y, A, [PE], PEG or a half-life prolonging derivative attached via a linker or the derivative may be attached with no linker
[0248] b) X₁ is the non-canonical amino acid [Cha], [NMeLeu], or a half-life prolonging derivative attached via a linker or the derivative may be attached with no linker c) X₂ is S or may have a PEG derivative attached via a linker or the derivative may be attached with no linker,
[0249] d) X₃ is H or may have a PEG or half-life prolonging derivative attached via a linker or the derivative may be attached with no linker
[0250] e) X₄ is P [Oic] or other secondary amino acid and
[0251] f) X₅ is F, [4-Cl—F], other aliphatic or aromatic amino acid or is absent.

[0252] 19. The isolated polypeptide of Embodiment 18 wherein z is PE.

[0253] 20. An isolated polypeptide comprising the amino acid sequence: [z]X₂RP[hArg]X₁X₃X₄KG[Oic][Nle]P[4Cl—F] (SEQ ID NO: 119) wherein:
[0254] a) z is PE,PEG or a half-life prolonging derivative attached via a linker or the derivative may be attached with no linker,
[0255] b) X₁ is the non-canonical amino acid [Cha] or [NMeLeu] and [Cha or NMeLeu] may or may not have a PEG derivative attached via a linker or the derivative may be attached with no linker,
[0256] c) X₂ is L or no amino acid and L may or may not have a PEG derivative attached via a linker or the derivative may be attached with no linker, and
[0257] d) X₃ is S or any PEG or half life-prolonging derivative attached via a linker or the PEG derivative may be attached with no linker, and
[0258] e) X₄ is H or any PEG or half life-prolonging derivative attached via a linker or the PEG derivative may be attached with no linker.

[0259] 21. An isolated polypeptide comprising the amino acid sequence: [z]LRP[hArg][X₁]SHKG[Oic][Nle]P[4Cl—F] (SEQ ID NO: 63) wherein:
[0260] a) z is PEG or half-life prolonging derivative attached via a linker or the derivative may be attached with no linker
[0261] b) X₁ is the non-canonical amino acid [Cha] or [NMeLeu], and
[0262] c) S may or may not have a PEG derivative attached via a linker or the derivative may be attached with no linker

[0263] 22. An isolated polypeptide comprising the amino acid sequence:

(SEQ ID NO: 120)
zX₄X₅X₆X₇X₈X₉P[hArg]X₁X₂X₃KGX₁₀[Nle]PX₁₁

[0264] a) z is PEG or half-life prolonging derivative attached via a linker or the derivative may be attached with no linker,
[0265] b) X₁ is the non-canonical amino acid [Cha] or [NMeLeu],
[0266] c) X₂ is S or may have a PEG or half life-prolonging derivative attached via a linker or the derivative may be attached with no linker,
[0267] d) X₃ is H or may have a PEG or half life-prolonging derivative attached via a linker or the derivative may be attached with no linker,
[0268] e) X₄ is K, [Orn] or no amino acid,
[0269] f) X₅ is F, an aromatic amino acid or no amino acid,
[0270] g) X₆ is R, K, Q, [hArg], [NMe-Arg], [Cit] or no amino acid,
[0271] h) X₇ is R, K, Q, [hArg], [NMe-Arg], [Cit] or no amino acid, and
[0272] i) X₈ is Q, I, V, [Nle], [Nva] or L
[0273] j) X₉ is R, K, Q, [hArg], [NMe-Arg], [Cit] or no amino acid,
[0274] k) X₁₀ is P [Oic], or other secondary amino acid and
[0275] l) X₁₁ is F, [4-Cl—F], [4-F—F], [4-I—F], [1-Nal], [2-Nal], [Bip], [Dip], [Tic] in either in the L- or D-optical configuration, or other aromatic amino acid either in the L- or D-optical configuration

[0276] 23. An isolated polypeptide comprising the amino acid sequence:

(SEQ ID NO: 121)
zX₁X₂X₃X₄X₅X₆X₇X₈X₉X₁₀X₁₁X₁₂X₁₃X₁₄X₁₅X₁₆X₁₇

[0277] a) z is PEG or other moiety to extend circulating half-life
[0278] b) X₁ is K, H, Y, F, [2Pal], [3Pal], [4Pal], [Orn], [Dpr], [Dab], no amino acid, or PEG or other moiety to extend circulating half-life,
[0279] c) X₂ is F, Y, W, no amino acid, or PEG or other moiety to extend circulating half-life,
[0280] d) X₃ is R, K, Q, H, Y, F, A, P, S, L, I, [2Pal], [3Pal], [4Pal], [Orn], [Dpr], [Dab], [hArg], [NMe-Arg], [Cit], no amino acid, or PEG or other moiety to extend circulating half-life,
[0281] e) X₄ is R, K, Q, H, Y, F, A, P, S, L, I, [2Pal], [3Pal], [4Pal], [Orn], [Dpr], [Dab], [hArg], [NMe-Arg], [Cit], no amino acid, or PEG or other moiety to extend circulating half-life,
[0282] f) X₅ is Q, L, V, I, F, Y, A, [PE], no amino acid, or PEG or other moiety to extend circulating half-life,
[0283] g) X₆ is R, K, [2Pal], [3Pal], [4Pal], [Orn], [Dpr], [Dab], [hArg], [NMe-Arg], or [Cit], h) X₇ is P, G, [Oic], or other secondary amino acid
[0284] i) X₈ is R, K, [2Pal], [3Pal], [4Pal], [Orn], [Dpr], [Dab], [hArg], [NMe-Arg], or [Cit],
[0285] j) X₉ is non-canonical amino acid [Cha] or [NMeLeu]
[0286] k) X₁₀ is S or PEG or other moiety to extend circulating half-life attached via a linker or the moiety may be attached with no linker
[0287] l) X₁₁ is H or PEG or other moiety to extend circulating half-life attached via a linker or the moiety may be attached with no linker
[0288] m) X₁₂ is K, another basic amino acid, aliphatic amino acid, or aromatic amino acid,
[0289] n) X₁₃ is G, A, or P,
[0290] o) X₁₄ is P, [Oic], [hPro], [Tic], Tiq] or other secondary amino acid
[0291] p) X₁₅ is M, L, V, I, [Nle][Cha] or other aliphatic amino acid
[0292] q) X₁₆ is P, [Oic], [hPro], [Tic], Tiq], or any other aliphatic or aromatic amino acid
[0293] r) X₁₇ is F, [4-Cl—F], [4-F—F], [4-I—F], [1-Nal], [2-Nal], [Bip], [Dip], [Tic] in either in the L- or D-optical configuration, other aromatic amino acid either in the L- or D-optical configuration, or is absent.

[0294] 24. The isolated polypeptide of any one of Embodiments 1-23 in which the L, R, P, [hArg], S, H, K, G or [4Cl—F] is replaced with a corresponding amino-methyl amino acid, alpha-methyl amino acid, or amide bond (at S-H, H—K or G-[Oic] is replaced with an amide bond surrogate.

[0295] 25. The isolated polypeptide of any one of Embodiments 1-24 wherein the PEG is thiopropionyl(20K-mPEG), Atz(PEG10), NPeg11 or Atz(20K-mPEG).

[0296] 26. An isolated polypeptide comprising at least 13 amino acids of SEQ ID NO: 1 wherein said polypeptide:

[0297] a) contains a PEG derivative at the N- or C-terminus of the polypeptide,

[0298] b) contains hArg at what would be residue 68 of SEQ ID NO: 1,

[0299] c) contains Cha at what would be residue 69 of SEQ ID NO: 1,

[0300] d) contains Oic at what would be residue number 74 of SEQ ID NO: 1,

[0301] e) contains Nle at what would be residue number 75 of SEQ ID NO: 1, and

[0302] f) contains Oic at what would be residue number 77 of SEQ ID NO: 1.

[0303] 27. The isolated polypeptide of Embodiment 26 wherein the polypeptide comprises at least amino acids number 65-77 of SEQ ID NO: 1.

[0304] 28. The isolated polypeptide of Embodiment 26 wherein said polypeptide is selected from the group consisting of at least amino acids numbers 64-77, 63-77, 62-77, 61-77, 60-77, 59-77, 58-77, 65-78, 65-79, 65-80 and 65-81.

[0305] 29. An isolated polypeptide comprising at least the sequence: [hArg][Cha]XXXX[Oic][Nle] (SEQ ID NO: 64) wherein X is any amino acid and the polypeptide contains a PEG derivative or PE at the N- or C-terminus of the polypeptide.

[0306] 30. The isolated polypeptide of Embodiment 29 wherein the polypeptide comprises the sequence [hArg][Cha]SHKG[Oic][Nle]P[4-Cl—F] (SEQ ID NO: 65).

[0307] 31. The isolated polypeptide of Embodiment 29 wherein the polypeptide comprises at least 13 residues.

[0308] 32. An isolated polypeptide having an amino acid sequence selected from the group of sequences consisting of:

a.
(SEQ ID NO: 3)
[PE]RP[hArg][Cha]S[ [symbol] ]HKG[Oic][Nle]P[4-Cl-F],
b.
(SEQ ID NO: 4)
[PE]RP[hArg][NMeLeu][ [symbol] ]HKG[Oic][Nle]P[4-Cl-F],
c.
(SEQ ID NO: 5)
[PE]RP[hArg][Cha]S[ [symbol] ]KG[Oic][Nle]P[4-Cl-F],
d.
(SEQ ID NO: 6)
[PE]RP[hArg][NMeLeu]S[ [symbol] ]KG[Oic][Nle]P[4-Cl-F],
e.
(SEQ ID NO: 7) [symbol]
LRP[hArg][Cha][ [symbol] ]HKG[Oic][Nle]P[4-Cl-F],
f.
(SEQ ID NO: 8) [symbol]
LRP[hArg][NMeLeu][ [symbol] ]HKG[Oic][Nle]P[4-Cl-F],
g.
(SEQ ID NO: 9) [symbol]
LRP[hArg][Cha]S[ [symbol] ]KG[Oic][Nle]P[4-Cl-F],
h.
(SEQ ID NO: 10) [symbol]
LRP[hArg][NMeLeu]S[ [symbol] ]KG[Oic][Nle]P[4-Cl-F],
i.
(SEQ ID NO: 11) [symbol]
KFRRQRP[hArg][Cha]SHKG[Oic][Nle]P[4-Cl-F],
j.
(SEQ ID NO: 12) [symbol]
KFRRQRP[hArg][NMeLeu]SHKG[Oic][Nle]P[4-Cl-F],
k.
(SEQ ID NO: 13) [symbol]
FRRQRP[hArg][Cha]SHKG[Oic][Nle]P[4-Cl-F],
l.
(SEQ ID NO: 14) [symbol]
FRRQRP[hArg][NMeLeu]SHKG[Oic][Nle]P[4-Cl-F],
m.
(SEQ ID NO: 15) [symbol]
RRQRP[hArg][Cha]SHKG[Oic][Nle]P[4-Cl-F],
n.
(SEQ ID NO: 16) [symbol]
RRQRP[hArg][NMeLeu]SHKG[Oic][Nle]P[4-Cl-F],
o.
(SEQ ID NO: 17) [symbol]
RQRP[hArg][Cha]SHKG[Oic][Nle]P[4-Cl-F],
p.
(SEQ ID NO: 18) [symbol]
RQRP[hArg][NMeLeu]SHKG[Oic][Nle]P[4-Cl-F],
q.
(SEQ ID NO: 19) [symbol]
QRP[hArg][NMeLeu]SHKG[Oic][Nle]P[4-Cl-F],
r.
(SEQ ID NO: 20) [symbol]
QRP[hArg][Cha]SHKG[Oic][Nle]P[4-Cl-F],
s.
(SEQ ID NO: 21) [symbol]
LRP[hArg][Cha]SHKG[Oic][Nle]P[4-Cl-F],
and
t.
(SEQ ID NO: 22) [symbol]
LRP[hArg][NMeLeu]SHKG[Oic][Nle]P[4-Cl-F],

wherein PE is pyroglutamate and “ [symbol] ” or “ [symbol] ” may be any PEG or other half-life prolonging derivative.

[0309] 33. The isolated polypeptide of Embodiment 32, wherein the PEG derivative is thiopropionyl(20K-mPEG), Atz(PEG10), NPeg11 or Atz(20K-mPEG).

[0310] 34. An isolated polypeptide having an amino acid sequence selected from the group consisting of:

a.
(SEQ ID NO: 23)
[PE]RP[hArg][Cha][Atz(PEG10)]HKG[Oic][Nle]P
[4-Cl-F],
b.
(SEQ ID NO: 24)
Thiopropionyl(20K-mPEG)-KFRRQRP[hArg][Cha]
SHKG[Oic][Nle]P[4-Cl-F],
c.
(SEQ ID NO: 25)
Atz(20K-mPEG)-KFRRQRP[hArg][Cha]SHKG[Oic][Nle]
P[4-Cl-F],
d.
(SEQ ID NO: 26)
Thiopropionyl(20K-mPEG)-LRP[hArg][Cha]SHKG[Oic]
[Nle]P[4-Cl-F],
e.
(SEQ ID NO: 27)
Atz(20K-mPEG)-LRP[hArg][Cha]SHKG[Oic][Nle]
P[4-Cl-F],
and
f.
(SEQ ID NO: 28)
NPeg11-KFRRQRP[hArg][Cha]SHKG[Oic][Nle]P[4-Cl-F],

wherein PE is pyroglutamate.

[0311] 35. An isolated polypeptide having the formula

(SEQ ID NO: 66)
zx¹x²x³x⁴x⁵x⁶x⁷x⁸x⁹x¹⁰x¹¹x¹²x¹³x¹⁴x¹⁵x¹⁶x¹⁷

wherein:

[0312] z is an amino acid, a polypeptide or a conjugation linker;
[0313] x¹-x⁴ is absent, is an amino acid, or is a conjugation linker;

[0314] x⁵ is absent or is a nonfunctional, hydrophobic, polar amino acid, or a conjugation linker;

[0315] x⁶ is absent or is a polar or basic amino acid;

[0316] x⁷, x⁹ and x¹⁶ is a nonfunctional or hydrophobic amino acid;

[0317] x⁸ is a basic or polar amino acid;

[0318] x¹⁰ is a nonfunctional, polar, or hydrophobic residue, or a conjugation linker

[0319] x¹¹ is a nonfunctional, polar, basic, or hydrophobic residue, or a conjugation linker;

[0320] x¹² is a nonfunctional, hydrophobic, polar, or basic residue;

[0321] x¹³ is a nonfunctional or aromatic residue;

[0322] x¹⁴ is a nonfunctional or hydrophilic residue;

[0323] x¹⁵ is a nonfunctional, polar, or hydrophobic residue; and

[0324] x¹⁷ is absent or is a hydrophobic residue.

[0325] 36. A composition of matter having the formula:

V-(A)

wherein:

[0326] V is a vehicle,

[0327] A is -(L1)a-P1, -(L1)a-P1-(L2)a-P2, -(L1)a-P1-(L2)a-P2-(L3)a-P3, -(L1)a-P1-(L2)a-P2-(L3)a-P3-(L4)a-P4, or higher multimers thereof, wherein:

[0328] a is 1 or 0,

[0329] P1, P2, P3, and P4 are each independently the same or different APJ agonist polypeptides, and

[0330] L1, L2, L3, and L4 are each independently linkers.

[0331] 37. The composition of matter of Embodiment 36 wherein the vehicle is PEG or pyroglutamate.

[0332] 38. The composition of matter of Embodiment 37, wherein V is a PEG derivative.

[0333] 39. The composition of matter of Embodiment 36, wherein V is a Fc domain.

[0334] 40. The composition of matter of Embodiment 36, wherein V is an Ab or portion thereof.

[0335] 41. The composition of matter of Embodiment 36, wherein V is a protein.

[0336] 42. The composition of matter of Embodiment 36, wherein V is a peptide.

[0337] 43. The composition of matter of Embodiment 36, wherein V is a lipid.

[0338] 44. The composition of matter of Embodiment 36, wherein V is a polymeric nanostructure.

[0339] 45. The composition of matter of Embodiment 36, wherein V-(A) further comprises additional A's independently attached to V.

[0340] 46. The composition of matter of Embodiment 45, wherein 2, 3 or 4 A's are attached independently to V.

[0341] 47. The isolated polypeptide or composition of matter of any one of Embodiments 1, 9, 15, 18, 20, 22, 23, 24, 26, 32, 34, 35, 36 or 52 having agonistic activity on the heart.

[0342] 48. The isolated polypeptide of Embodiment 47 wherein the agonistic activity results in increased cardiac contractility.

[0343] 49. The isolated polypeptide of Embodiment 47, wherein the agonistic activity results in an increase in dP/Dtₘₐₓ, dp/dtₘᵢₙ or heart rate.

[0344] 50. The isolated polypeptide of Embodiment 47, wherein the agonistic activity results in improved systolic or diastolic function.

[0345] 51. A method of improving cardiac contractility comprising administering the polypeptide of any one of Embodiments 1, 9, 15, 18, 20, 22, 23, 24, 26, 32, 34, 35 or 52

[0346] 52. An isolated polypeptide having a sequence selected from the group of sequences consisting of: SEQ ID NOs: 51-75 or SEQ ID NOs: 129-136.

[0347] 53. The APJ agonist of Embodiment 1 wherein the APJ agonist is greater than 7, 9, 9, 10, 11, 12 amino acids long, e.g. 13 or more amino acids long and the half-life prolonging group can be anywhere in the molecule.

[0348] 54. An APJ agonist having increased stability relative to wild type Apelin-13 (SEQ ID NO:2), wherein the APJ agonist is modified with a half-life prolonging group at the N-terminus, the C-terminus, or elsewhere in the peptide and at least one amino acid is replaced with a non-canonical amino acid.

[0349] 55. The APJ agonist of embodiment 54 that binds to the APJ receptor.

[0350] 56. The APJ agonist of embodiment 54, wherein the half-life prolonging group is selected from the group consisting of PEG, an Fc domain, IgG, HSA, PE, an Ab, a peptide, a protein, a lipid, cholesterol, a nanostructure, or any other half-life prolonging moiety

[0351] 57. The APJ agonist of embodiment 54 wherein the agonist is pyroglutamated, acylated, arylated, alkylated, or has a conjugation linker at the N-terminus and is optionally PEGylated or contains any other half-life prolonging moiety at the N-terminus or elsewhere in the agonist.

[0352] Examples of embodiments 54-57 can be found in Table 5 that contains SEQ ID NOs: 139-161. In the table, a free acid can be a carboxylic acid and an amide can be an amidated C-terminus

TABLE 5

| | | SEQ |
|---|---|---|
| | | ID |
| AMINO ACID SEQUENCE | DESIGNATION | NO. |
| {Acetyl}[Atz(PEG10)]GGL | Ac-Atz(PEG10)-Gly-Gly- | 139 |
| RPRLSHKGPMPF{Free Acid} | [Leu65]Apelin-13(65-77) | |
| {Acetyl}[Atz(PEG10)]GLR | Ac-Atz(PEG10)-Gly- | 140 |
| PRLSHKGPMPF{Free Acid} | [Leu65]Apelin-13(65-77) | |
| {Acetyl}[Atz(PEG10)]LRP | Ac-Atz(PEG10)- | 141 |
| RLSHKGPMPF{Free Acid} | [Leu65]Apelin-13(65-77) | |
| {Acetyl}[Atz(PEG10)] | Ac-[Atz(PEG10)65,66] | 142 |
| [Atz(PEG10)]PRLSHKGPMPF | Apelin-13(65-77) | |
| {Free Acid} | | |
| {Hydrogen}[PE][Atz | [PE65;Atz(PEG10)66] | 143 |
| (PEG10)]PRLSHKGPMPF | Apelin-13(65-77) | |
| {Free Acid} | | |
| {Hydrogen}[PE]R[Atz | [PE65;Atz(PEG10)67] | 144 |
| (PEG10)]RLSHKGPMPF | Apelin-13(65-77) | |
| {Free Acid} | | |
| {Hydrogen}[PE]RP[Atz | [PE65;Atz(PEG10)68] | 145 |
| (PEG10)]LSHKGPMPF | Apelin-13(65-77) | |
| {Free Acid} | | |
| {Hydrogen}[PE]RPR[Atz | [PE65;Atz(PEG10)69] | 146 |
| (PEG10)]SHKGPMPF | Apelin-13(65-77) | |
| {Free Acid} | | |
| {Hydrogen}[PE]RPRL[Atz | [PE65;Atz(PEG10)70] | 147 |
| (PEG10)]HKGPMPF | Apelin-13(65-77) | |
| {Free Acid} | | |
| {Hydrogen}[PE]RPRLS | [PE65;Atz(PEG10)71] | 148 |
| [Atz(PEG10)]KGPMPF | Apelin-13(65-77) | |
| {Free Acid} | | |
| {Hydrogen}[PE]RPRLSH | [PE65;Atz(PEG10)72] | 149 |
| [Atz(PEG10)]GPMPF | Apelin-13(65-77) | |
| {Free Acid} | | |
| {Hydrogen}[PE]RPRLSHK | [PE65;Atz(PEG10)73] | 150 |
| [Atz(PEG10)]PMPF | Apelin-13(65-77) | |
| {Free Acid} | | |
| {Hydrogen}[PE]RPRLSHKG | [PE65;Atz(PEG10)74] | 151 |
| [Atz(PEG10)]MPF | Apelin-13(65-77) | |
| {Free Acid} | | |
| {Hydrogen}[PE]RPRLSHKGP | [PE65;Atz(PEG10)75] | 152 |
| [Atz(PEG10)]PF | Apelin-13(65-77) | |
| {Free Acid} | | |
| {Hydrogen}[PE]RPRLSHKGP | [PE65;Atz(PEG10)76] | 153 |
| M[Atz(PEG10)]F | Apelin-13(65-77) | |
| {FreeAcid} | | |
| {Hydrogen}[PE]RPRLSHKGP | [PE65;Atz(PEG10)77] | 154 |
| MP[Atz(PEG10)]{Amide} | Apelin-13(65-77)-amide | |
| {Hydrogen}[PE]RPRLSHKGP | [PE65]Apelin-13(65-77)- | 155 |
| MPF[Atz(PEG10)]{Amide} | Atz(PEG10)-amide | |
| {Hydrogen}[PE]RPRLSHKGP | [PE65]Apelin-13(65-77)- | 156 |
| MPFG[Atz(PEG10)]{Amide} | Gly-Atz(PEG10)-amide | |
| {Hydrogen}[PE]RPRLSHKGP | [PE65]Apelin-13(65-77)- | 157 |
| MPFGG[Atz(PEG10)] | Gly-Gly-Atz(PEG10)- | |
| {Amide} | amide | |
| {Hydrogen}[Atz(PEG10)] | [Atz(PEG10)41;Nle75] | 158 |
| LVQPRGSRNGPGPWQGGRRKFRR | Ape1in-36(41-77) | |
| QRPRLSHKGP[Nle]PF | | |
| {Free Acid} | | |
| {Hydrogen}[Atz(PEG10)] | [Atz(PEG10)51;Nle75] | 159 |
| PGPWQGGRRKFRRQRPRLSHKGP | Apelin-26(51-77) | |
| [Nle]PF{Free Acid} | | |
| {Hydrogen}[Atz(PEG10)]K | [Atz(PEG10)60;Nle75] | 160 |
| FRRQRPRLSHKGP[Nle]PF | Apelin-17(60-77) | |
| {Free Acid} | | |
| {Hydrogen}[Atz(PEG10)]Q | Atz(PEG10)-[Nle75] | 161 |
| RPRLSHKGP[Nle]PF | Apelin-13(65-77) | |
| {Free Acid} | | |

[0353] Additional numbered embodiments can include:

[0354] 58. The APJ agonist of Embodiment 54 wherein the increased stability is an increased in vivo or in vitro half-life.

[0355] 59. An APJ agonist having increased stability or potency relative to wild type Apelin-13 (SEQ ID NO:2), wherein the APJ agonist is modified with a half-life prolonging group at the N-terminus, the C-terminus, or elsewhere in the peptide and at least one amino acid is replaced with a non-canonical amino acid.

[0356] 60. The APJ agonist of Embodiment 59 wherein the increased potency is an increased in vivo or in vitro potency.

[0357] 61. The APJ agonist of Embodiment 54 wherein the agonist is PEGylated with thiopropionyl(1K-mPEG), thiopropionyl(2K-mPEG), thiopropionyl(5K-mPEG), thiopropionyl(10K-mPEG), thiopropionyl(20K-mPEG), thiopropionyl(40K-mPEG), Atz(PEG10), NPeg11, Atz(1K-mPEG), Atz(2K-mPEG), Atz(5K-mPEG), Atz(10K-mPEG), or Atz(20K-mPEG).

[0358] 62. An isolated polypeptide comprising the amino acid sequence [Z]X₋₄X₋₃X₂₋X₁X₁X₂PX₃X₄X₅X₆KGX₇X₈PX₉ (SEQ ID NO: 125) wherein:
[0359] a) Z is any amino acid, an acyl, aryl, or alkyl group, a conjugation linker, NPeg11, [Atz(PEG10)], a PEG derivative or other serum half-life prolonging group, or is absent. X₋₄ is K, [Orn], [MerPr], [Pra] or [Atz(PEG10)],
[0360] b) X₋₃ is F, A, [Pra], [MerPr] or [Atz(PEG10)],
[0361] c) X₋₂ is R, [2Pal], [3Pal], [Cit], [hArg], [Orn], [MerPr], A, E, F, H, I, K, L, P, Q, S, T,

[0362] V, W, Y, [NMeArg], [Pra] or [Atz(PEG10,
[0363] d) X₋₁ is R, [2Pal], [3Pal], [Cit], [hArg], [Orn], [Pra], [MerPr], A, E, F, H, I, K, L, P, Q, S, T, V, W, Y, [NMeArg] or [Atz(PEG10)],
[0364] e) X₁ is Q, N, E, D, L, V, I, P, H, W, F, Y, A, [1-Nal], [2-Nal], [Bip], [Cha], [Nle], [Pra], [MerPr], [PE] or [Atz(PEG10)],
[0365] f) X₂ is R, A, K, Q, [Pra], [MerPr], [2Pal], [3Pal], [4Pal], [Orn], [Dpr], [Dab], [hArg], [NMe-Arg], [Cit] or [Atz(PEG10)],
[0366] g) X₃ is R, K, Q, [2Pal], [3Pal], [4Pal], [Orn], [Dpr], [Dab], [hArg], [NMe-Arg], [Cit], [Pra], L or [Atz(PEG10)],
[0367] h) X₄ is L, A, F, Q, S, [2-Nal], [Bip], [Cha], [Chg], [pI-Phe], [Pra] or [NMeLeu],
[0368] i) X₅ is S, [1-Nal], [2-Nal], [2Pal], [3Pal], [4-Cl—F], [4-F—F], [4-I—F], [4-Me-F], [Abu], [Bip], [Cha], [Chg], [Cit], [Cpg], [Dab], [Dap], [Dip], [Nle], [NMe-Phe], [Nva], [Orn], [Atz(PEG10)], [Pra], [Tic], A, F, G, H, I, L, R, T, V, W or Y,
[0369] j) X₆ is [1-Nal], [2-Nal], [2Pal], [3Pal], [4-Cl—F], [4-F—F], [4-I—F], [Abu], [Bip], [Cha], [Chg], [Cpg], [Dab], [Dap], [Dip], [Nle], [NMe-Phe], [Nva], [Orn], [Atz(PEG10)], [Pra], [Tic], A, F, G, h, H, I, K, L, O, R, T, V, W or Y,
[0370] k) X₂ is P, [Oic], [hero], [Tic], [Tiq], [Thz], [1-Nal], [Pra] or [Atz(PEG10)],
[0371] l) X₈ is M, [4-Cl—F], [4-F—F], [4-Me-F], [Bip], [Cha], [Nle], [NMeLeu], [pI-Phe], [Atz(PEG10)], [Pra], A, F, P or S, and
[0372] m) X₉ is F, [1-Nal], [2-Nal], [4-Cl—F], [4-F—F], [4-Me-F], [4-NO2-F], [D-1Nal], [D-Bip], [NMePhe], [pI-Phe], [Atz(PEG10)], [Pra], A, K, f, G, P, w, W, y, Y, Y, [4-F—F], [2-Nal], [Bip], [Dip], [Tic] in either the L- or D-optical configuration, or an aromatic amino acid in either the L- or D-optical configuration.

[0373] 63. The isolated polypeptide of Embodiment 62, wherein at least four amino acid residues in the X positions are amino acids not present at residue 61-66, 68-71, 74, 75 or 77 of wild type apelin (SEQ ID NO: 138), wherein the polypeptide has increased proteolytic stability and/or an increased plasma/serum residence time relative to wild type Apelin-13 (SEQ ID NO: 2) and Z is any amino acid, a polypeptide chain extension, an acyl group, an aryl group, NPEG11, [Atz(PEG)10], a PEG derivative, a serum half-life prolonging group or is absent.

[0374] 64. The isolated polypeptide of claim 65 comprising a PEG derivative or other moiety to extend circulating half-life, wherein said derivative or moiety is or is not attached via a linker.

[0375] 65. An APJ agonist having an amino acid sequence selected from the group of sequences consisting of SEQ ID NOs: 162-430. These are shown below in Table 6. In the table a free acid can be a carboxylic acid and an amide can be an amidated C-terminus

TABLE 6

| | | SEQ ID |
|---|---|---|
| AMINO ACID SEQUENCE | DESIGNATION | NO. |
| {Hydrogen}[PE]RP[hArg][NMeLeu] | [PE65; hArg68; NMeLeu69; pI-Phe75; 4- | 162 |
| SHKGP[pI-Phe]P[4-F—F]{FreeAcid} | F—F77]Apelin-13(65-77) | |
| {Hydrogen}[PE]RP[hArg][Cha]SHKGP | [PE65; hArg68; Cha69; pI-Phe75; 4-F— | 163 |
| [pI-Phe]P[4-F—F]{FreeAcid} | F77]Apelin-13(65-77) | |
| {Hydrogen}[PE]RP[hArg][NMeLeu] | [PE65; hArg68; NMeLeu69; pI-Phe75; 4- | 164 |
| SHKGP[pI-Phe]P[4-Me—F]{FreeAcid} | Me—F77]Apelin-13(65-77) | |
| {Hydrogen}[PE]RP[hArg][Cha]SHKGP | [PE65; hArg68; Cha69; pI-Phe75; 4-Me— | 165 |
| [pI-Phe]P[4-Me—F]{FreeAcid} | F77]Apelin-13(65-77) | |
| {Hydrogen}[PE]RP[hArg][Cha]SHKGP | [PE65; hArg68; Cha69; Nle75; 4-Me— | 166 |
| [Nle]P[4-Me—F]{FreeAcid} | F77]Apelin-13(65-77) | |
| {Hydrogen}[PE]RP[hArg][Cha]SHKGP | [PE65; hArg68; Cha69; Nle75; D- | 167 |
| [Nle]P[D-Bip]{FreeAcid} | Bip77]Apelin-13(65-77) | |
| {Hydrogen}[PE]RP[hArg][NMeLeu] | [PE65; hArg68; NMeLeu69; Nle75; D- | 168 |
| SHKGP[Nle]P[D-1Nal]{FreeAcid} | 1Nal77]Apelin-13(65-77) | |
| {Hydrogen}[PE]RP[hArg][NMeLeu] | [PE65; hArg68; NMeLeu69; pI-Phe75; D- | 169 |
| SHKGP[pI-Phe]P[D-1Nal]{FreeAcid} | 1Nal77]Apelin-13(65-77) | |
| {Hydrogen}[PE]RP[hArg][Cha]SHKGP | [PE65; hArg68; Cha69; pI-Phe75; D- | 170 |
| [pI-Phe]P[D-1Nal]{FreeAcid} | 1Nal77]Apelin-13(65-77) | |
| {Hydrogen}[PE]RP[hArg][Cha]SHKGP | [PE65; hArg68; Cha69; Nle75; D- | 171 |
| [Nle]P[D-1Nal]{FreeAcid} | 1Nal77]Apelin-13(65-77) | |
| {Hydrogen}[PE]RP[hArg][Cha]SHKGP | [PE65; hArg68; Cha69; pI- | 172 |
| [pI-Phe]P[pI-Phe]{FreeAcid} | Phe75, 77]Apelin-13(65-77) | |
| {Hydrogen}[PE]RP[hArg][Cha]SHKGP | [PE65; hArg68; Cha69; pI- | 173 |
| [pI-Phe]PY{FreeAcid} | Phe75; Tyr77]Apelin-13(65-77) | |
| {Hydrogen}[PE]RP[hArg][Cha]SHKGP | [PE65; hArg68; Cha69; Nle75; pI- | 174 |
| [Nle]P[pI-Phe]{FreeAcid} | Phe77]Apelin-13(65-77) | |
| {Hydrogen}[PE]RP[hArg][Cha]SHKGP | [PE65; hArg68; Cha69; pI-Phe75; D- | 175 |
| [pI-Phe]Pf{FreeAcid} | Phe77]Apelin-13(65-77) | |
| {Hydrogen}[PE]RP[hArg][Cha]SHKGP | [PE65; hArg68; Cha69; Nle75; D- | 176 |
| [Nle]Pf{FreeAcid} | Phe77]Apelin-13(65-77) | |
| {Hydrogen}[PE]RP[hArg][NMeLeu] | [PE65; hArg68; NMeLeu69; Nle75; | 177 |
| SHKGP[Nle]P[NMePhe]{Amide} | NMePhe77]Apelin-13(65-77)-amide | |
| {Hydrogen}[PE]RP[hArg][NMeLeu] | [PE65; hArg68; NMeLeu69; Nle75; D- | 178 |
| SHKGP[Nle]Pw{FreeAcid} | Trp77]Apelin-13(65-77) | |
| {Hydrogen}[PE]RP[hArg][NMeLeu] | [PE65; hArg68; NMeLeu69; pI-Phe75; D- | 179 |
| SHKGP[pI-Phe]Pw{FreeAcid} | Trp77]Apelin-13(65-77) | |
| {Hydrogen}[PE]RP[hArg][Cha]SHKGP | [PE65; hArg68; Cha69; pI-Phe75; D- | 180 |
| [pI-Phe]Pw{FreeAcid} | Trp77]Apelin-13(65-77) | |
| {Hydrogen}[PE]RP[hArg][Cha]SHKGP | [PE65; hArg68; Cha69; Nle75; D- | 181 |
| [Nle]Pw{FreeAcid} | Trp77]Apelin-13(65-77) | |
| {Hydrogen}[PE]RP[hArg][Cha]SHKGP | [PE65; hArg68; Cha69; Nle75; Tyr77] | 182 |
| [Nle]PY{FreeAcid} | Apelin-13(65-77) | |
| {Hydrogen}[PE]RP[hArg][NMeLeu] | [PE65; hArg68; NMeLeu69; Nle75; D- | 183 |
| SHKGP[Nle]Py{FreeAcid} | Tyr77]Apelin-13(65-77) | |
| {Hydrogen}[PE]RP[hArg][NMeLeu] | [PE65; hArg68; NMeLeu69; pI-Phe75; D- | 184 |
| SHKGP[pI-Phe]Py{FreeAcid} | Tyr77]Apelin-13(65-77) | |
| {Hydrogen}[PE]RP[hArg][Cha]SHKGP | [PE65; hArg68; Cha69; pI-Phe75; D- | 185 |
| [pI-Phe]Py{FreeAcid} | Tyr77]Apelin-13(65-77) | |
| {Hydrogen}[PE]RP[hArg][Cha]SHKGP | [PE65; hArg68; Cha69; Nle75; D- | 186 |
| [Nle]Py{FreeAcid} | Tyr77]Apelin-13(65-77) | |
| {Hydrogen}[PE]RP[hArg][NMeLeu] | [PE65; hArg68; NMeLeu69; Phe70; pI- | 187 |
| FHKGP[pI-Phe]P[2-Nal]{FreeAcid} | Phe75; 2-Nal77]Apelin-13(65-77) | |
| {Hydrogen}[PE]RP[hArg][NMeLeu] | [PE65; hArg68; NMeLeu69; Phe70; Nle75; | 188 |
| FHKGP[Nle]P[D-Bip]{Amide} | D-Bip77]Apelin-13(65-77)-amide | |
| {Hydrogen}[PE]RP[hArg][NMeLeu] | [PE65; hArg68; NMeLeu69; Phe70; Nle75; | 189 |
| FHKGP[Nle]P[D-Bip]{FreeAcid} | D-Bip77]Apelin-13(65-77) | |
| {Hydrogen}[PE]RP[hArg][NMeLeu] | [PE65; hArg68; NMeLeu69; Phe70; pI- | 190 |
| FHKGP[pI-Phe]P[D-Bip]{FreeAcid} | Phe75; D-Bip77]Apelin-13(65-77) | |
| {Palmitoyl}LRP[hArg][NMeLeu]FHKGP | Palmitoyl- | 191 |
| [Nle]P[D-Bip]{FreeAcid} | [Leu65; hArg68; NMeLeu69; Phe70; Nle75; | |
| | D-Bip77]Apelin-13(65-77) | |
| {Hydrogen}[PE]RP[hArg][Cha]SHKGP | [PE65; hArg68; Cha69; pI-Phe75; D- | 192 |
| [pI-Phe]P[D-Bip]{FreeAcid} | Bip77]Apelin-13(65-77) | |
| {Hydrogen}[PE]RP[hArg][NMeLeu] | [PE65; hArg68; NMeLeu69; Nle75; 4-Me— | 193 |
| SHKGP[Nle]P[4-Me—F]{FreeAcid} | F77]Apelin-13(65-77) | |
| {Hydrogen}[PE]RP[hArg][NMeLeu] | [PE65; hArg68; NMeLeu69; Phe70; pI- | 194 |
| FHKGP[pI-Phe]P[D-Bip]{Amide} | Phe75; D-Bip77]Apelin-13(65-77)- | |
| | amide | |
| {Hydrogen}[PE]RP[hArg][Cha]SHKGP | [PE65; hArg68; Cha69; Nle75; D- | 195 |
| [Nle]Pf{Amide} | Phe77]Apelin-13(65-77)-amide | |
| {Hydrogen}[PE]RP[hArg][NMeLeu] | [PE65; hArg68; NMeLeu69; Nle75; 4-Cl— | 200 |
| SHKGP[Nle]P[4-Cl—F]{Amide} | F77]Apelin-13(65-77)-amide | |
| {Hydrogen}[PE]RP[hArg][NMeLeu] | [PE65; hArg68; NMeLeu69; Nle75; 4-Me— | 201 |
| SHKGP[Nle]P[4-Me—F]{Amide} | F77]Apelin-13(65-77)-amide | |
| {Hydrogen}[PE]RP[hArg][NMeLeu] | [PE65; hArg68; NMeLeu69; Nle75; Bip77] | 202 |
| SHKGP[Nle]P[Bip]{Amide} | Apelin-13(65-77)-amide | |
| {Hydrogen}[PE]RP[hArg][NMeLeu] | [PE65; hArg68; NMeLeu69; Nle75; D- | 203 |
| SHKGP[Nle]P[D-Bip]{Amide} | Bip77]Apelin-13(65-77)-amide | |
| {Hydrogen}[PE]RP[hArg][NMeLeu] | [PE65; hArg68; NMeLeu69; Nle75; 4- | 204 |
| SHKGP[Nle]P[4-NO2—F]{Amide} | NO2—F77]Apelin-13(65-77)-amide | |
| {Hydrogen}[PE]RP[hArg][NMeLeu] | [PE65; hArg68; NMeLeu69; 1- | 205 |
| SHKG[1-Nal][Nle]P[4-Cl—F]{Amide} | Nal74; Nle75; 4-Cl—F77]Apelin-13(65- | |
| | 77)-amide | |
| {Hydrogen}[PE]RP[hArg][NMeLeu] | [PE65; hArg68; NMeLeu69; Phe70; 1- | 206 |
| FHKG[1-Nal][Nle]P[4-Cl—F]{Amide} | Nal74; Nle75; 4-Cl—F77]Apelin-13(65- | |
| | 77)-amide | |
| {Hydrogen}[PE]RP[hArg][NMeLeu] | [PE65; hArg68; NMeLeu69; Phe70; Nle75; | 207 |
| FHKGP[Nle]P[4-Cl—F]{Amide} | 4-Cl—F77]Apelin-13(65-77)-amide | |
| {Hydrogen}[PE]RP[hArg][NMeLeu] | [PE65; hArg68; NMeLeu69; Ala71; 1- | 208 |
| SAKG[1-Nal][Nle]P[4-Cl—F]{Amide} | Nal74; Nle75; 4-Cl—F77]Apelin-13(65- | |
| | 77)-amide | |
| {Hydrogen}[PE]RP[hArg][NMeLeu] | [PE65; hArg68; NMeLeu69; Phe70; Ala71; | 209 |
| FAKG[1-Nal][Nle]P[4-Cl—F]{Amide} | 1-Nal74; Nle75; 4-Cl—F77]Apelin-13(65- | |
| | 77)-amide | |
| {Hydrogen}[PE]RP[hArg][NMeLeu] | [PE65; hArg68; NMeLeu69; Phe70; Ala71; | 210 |
| FAKGP[Nle]P[4-Cl—F]{Amide} | Nle75; 4-Cl—F77]Apelin-13(65-77)- | |
| | amide | |
| {Hydrogen}[PE]RP[hArg][NMeLeu]S | [PE65; hArg68; NMeLeu69; 1- | 211 |
| [1-Nal]KG[1-Nal][Nle]P[4-Cl— | Nal71, 74; Nle75; 4-Cl—F77]Apelin- | |
| F]{Amide} | 13(65-77)-amide | |
| {Hydrogen}[PE]RP[hArg][NMeLeu]F | [PE65; hArg68; NMeLeu69; Phe70; 1- | 212 |
| [1-Nal]KG[1-Nal][Nle]P[4-Cl— | Nal71, 74; Nle75; 4-Cl—F77]Apelin- | |
| F]{Amide} | 13(65-77)-amide | |
| {Hydrogen}[PE]RP[hArg][NMeLeu]F | [PE65; hArg68; NMeLeu69; Phe70; 1- | 213 |
| [1-Nal]KGP[Nle]P[4-Cl—F]{Amide} | Nal71; Nle75; 4-Cl—F77]Apelin-13(65- | |
| | 77)-amide | |
| {Hydrogen}[PE]RP[hArg][NMeLeu]F | [PE65; hArg68; NMeLeu69; Phe70; 1- | 214 |
| [1-Nal]KGP[Nle]P[4-Cl—F]{Amide} | Nal71; Nle75; 4-Cl—F77]Apelin-13(65- | |
| | 77)-amide | |
| {Hydrogen}[PE]RP[hArg][NMeLeu] | [PE65; hArg68; NMeLeu69; NMePhe70; | 215 |
| [NMePhe][1-Nal]KGP[Nle]P[4-Cl— | 1-Nal71; Nle75; 4-Cl—F77]Apelin-13(65- | |
| F]{Amide} | 77)-amide | |
| {Hydrogen}[PE]RP[hArg][NMeLeu] | [PE65; hArg68; NMeLeu69; NMePhe70; | 216 |
| [NMePhe]AKG[1-Nal][Nle]P[4-Cl— | Ala71; 1-Nal74; Nle75; 4-Cl—F77]Apelin- | |
| F]{Amide} | 13(65-77)-amide | |
| {Hydrogen}[PE]RP[hArg][NMeLeu] | [PE65; hArg68; NMeLeu69; NMePhe70; | 217 |
| [NMePhe]AKG[1-Nal][Nle]P[4-Cl— | Ala71; 1-Nal74; Nle75; 4-Cl—F77]Apelin- | |
| F]{Amide} | 13(65-77)-amide | |
| {Hydrogen}[PE]RP[hArg][NMeLeu]F | [PE65; hArg68; NMeLeu69; Phe70; 2- | 218 |
| [2-Nal]KG[1-Nal][Nle]P[4-Cl— | Nal71; 1-Nal74; Nle75; 4-Cl—F77]Apelin- | |
| F]{Amide} | 13(65-77)-amide | |
| {Hydrogen}[PE]RP[hArg][NMeLeu]F | [PE65; hArg68; NMeLeu69; Phe70; 2- | 219 |
| [2-Nal]KGP[Nle]P[4-Cl—F]{Amide} | Nal71; Nle75; 4-Cl—F77]Apelin-13(65- | |
| | 77)-amide | |
| {Hydrogen}[PE]RP[hArg][NMeLeu] | [PE65; hArg68; NMeLeu69; NMePhe70; | 220 |
| [NMePhe][2-Nal]KGP[Nle]P[4-Cl— | 2-Nal71; Nle75; 4-Cl—F77]Apelin-13(65- | |
| F]{Amide} | 77)-amide | |
| [PE]RP[hArg][NMeLeu]SHKGP[Nle]P | [PE65; hArg68; NMeLeu69; Nle75; D- | 221 |
| [D-Bip] | Bip77]Apelin-13(65-77) | |
| [PE]RP[hArg][NMeLeu]SHKGP[pI- | [PE65; hArg68; NMeLeu69; pI-Phe75; D- | 222 |
| Phe]P[D-Bip] | Bip77]Apelin-13(65-77) | |
| [PE]RP[hArg][NMeLeu]SHKGP[pI- | [PE65; hArg68; NMeLeu69; pI-Phe75; 2- | 223 |
| Phe]P[2-Nal] | Nal77]Apelin-13(65-77) | |
| {Palmitoyl}LRP[hArg][NMeLeu] | Palmitoyl- | 224 |
| SHKGP[pI-Phe]P[D-Bip] | Leu65; hArg68; NMeLeu69; pI-Phe75; D- | |
| | Bip77]Apelin-13(65-77) | |
| [PE]RP[hArg][NMeLeu]SHKGP[Nle]P | PE65; hArg68; NMeLeu69; Nle75; D- | 225 |
| [D-Bip]K{Amide} | Bip77; K(Palmitoyl)78]Apelin-13(65- | |
| | 78)-amide | |
| [PE]RP[hArg][NMeLeu]SHKGP[Nle]P | [PE65; hArg68; NMeLeu69; Nle75; 2- | 226 |
| [2-Nal] | Nal77]Apelin-13(65-77) | |
| [PE]RP[hArg][NMeLeu]SHKGP[pI- | [PE65; hArg68; NMeLeu69; pI-Phe75; 4- | 227 |
| Phe]P[4-Cl—F] | Cl—F77]Apelin-13(65-77) | |
| [PE]RP[hArg][NMeLeu]SHKGP[Nle]P | [PE65; hArg68; NMeLeu69; Nle75; 4-Cl— | 228 |
| [4-Cl—F] | F77]Apelin-13(65-77) | |
| [PE]RP[hArg][NMeLeu]SHKGP[Nle]P | [PE65; hArg68; NMeLeu69; Nle75; 4-F— | 229 |
| [4-F—F] | F77]Apelin-13(65-77) | |
| [PE]RP[hArg][Cha]SHKGP[Nle]P[4-F— | [PE65; hArg68; Cha69; Nle75; 4-F— | 230 |
| F] | F77]Apelin-13(65-77) | |
| [PE]RP[hArg][NMeLeu]SHKGP[Nle]P | [PE65; hArg68; NMeLeu69; Nle75; pI- | 231 |
| [pI-Phe] | Phe77]Apelin-13(65-77) | |
| [PE]RP[hArg][NMeLeu]SHKGP[Nle]Pf | [PE65; hArg68; NMeLeu69; Nle75; D- | 232 |
| | Phe77]Apelin-13(65-77) | |
| {Palmitoyl}LRP[hArg][NMeLeu]SHKGP | Palmitoyl- | 233 |
| [pI-Phe]P[D-Bip] | Leu65; hArg68; NMeLeu69; pI-Phe75; D- | |
| | Bip77]Apelin-13(65-77) | |
| [PE]RP[hArg][NMeLeu]SHKGP[Nle]P | PE65; hArg68; NMeLeu69; Nle75; D- | 234 |
| [D-Bip]K{Amide} | Bip77; K(Palmitoyl)78]Apelin-13(65- | |
| | 78)-amide | |
| [PE]RP[hArg][Cha]SHKGP[pI- | [PE65; hArg68; Cha69; pI-Phe75; 2- | 235 |
| Phe]P[2-Nal] | Nal77]Apelin-13(65-77) | |
| {Acetyl}[Pra]LRP[hArg][NMeLeu][Pra] | Ac-Pra | 236 |
| HKGP[Nle]P[4-Cl—F]{FreeAcid} | [Leu65; hArg68; NMeLeu69; Pra70; | |
| | Nle75; 4-Cl—F77]Apelin-13(65-77) | |
| {Acetyl}[Pra]LRP[hArg][NMeLeu][Pra] | Ac-Pra | 237 |
| HKGP[Nle]P[4-Cl—F]{FreeAcid} | [Leu65; hArg68; NMeLeu69; Pra70; | |
| | Nle75; 4-Cl—F77]Apelin-13(65-77) | |
| {Acetyl}[Pra]LRP[NMeArg][NMeLeu] | Ac-Pra | 238 |
| [Pra]HKGP[Nle]P[4-Cl—F]{FreeAcid} | [Leu65; NMeArg68; NMeLeu69; Pra70; | |
| | Nle75; 4-Cl—F77]Apelin-13(65-77) | |
| {Acetyl}[Pra]L[NMeArg]P[hArg] | Ac-Pra | 239 |
| [NMeLeu][Pra]HKGP[Nle]P[4-Cl— | [Leu65; NMeArg66; hArg68; NMeLeu69; | |
| F]{FreeAcid} | Pra70; Nle75; 4-Cl—F77]Apelin-13(65- | |
| | 77) | |
| {Acetyl}[Pra]L[NMeArg]P[NMeArg] | Ac-Pra- | 240 |
| [NMeLeu][Pra]HKGP[Nle]P[4-Cl— | [Leu65; NMeArg66, 68; NMeLeu69; Pra70; | |
| F]{FreeAcid} | Nle75; 4-Cl—F77]Apelin-13(65-77) | |
| [PE]RP[hArg][NMeLeu][Pra]HKG[Oic] | [PE65; hArg68; NMeLeu69; Pra70; Oic74; | 241 |
| [Nle]P[4-Cl—F]{FreeAcid} | Nle75; 4-Cl—F77]Apelin-13(65-77) | |
| [PE]RP[hArg][NMeLeu][Pra]HKG[Oic] | [PE65; hArg68; NMeLeu69; Pra70; Oic74; | 242 |
| [Nle]P[4-Cl—F]{FreeAcid} | Nle75; 4-Cl—F77]Apelin-13(65-77) | |
| [PE]RP[NMeArg][NMeLeu][Pra]HKG | [PE65; NMeArg68; NMeLeu69; Pra70; | 243 |
| [Oic][Nle]P[4-Cl—F]{FreeAcid} | Oic74; Nle75; 4-Cl—F77]Apelin-13(65-77) | |
| [PE][NMeArg]P[hArg][NMeLeu][Pra] | [PE65; NMeArg66; hArg68; NMeLeu69; | 244 |
| HKG[Oic][Nle]P[4-Cl—F]{FreeAcid} | Pra70; Oic74; Nle75; 4-Cl—F77]Apelin- | |
| | 13(65-77) | |
| [PE][NMeArg]P[NMeArg][NMeLeu] | [PE65; NMeArg66, 68; NMeLeu69; Pra70; | 245 |
| [Pra]HKG[Oic][Nle]P[4-Cl—F]{FreeAcid} | Oic74; Nle75; 4-Cl—F77]Apelin-13(65- | |
| | 77) | |
| KFRRQRP[hArg][Cha]SHKG[Oic][Nle] | [hArg68; Cha69; Oic74; Nle75; 4-Cl— | 246 |
| P[4-Cl—F] | F77]Apelin-17(61-77) | |
| {MeS- | 3-(methylthio)propionyl- | 247 |
| Propionyl}KFRRQRP[hArg][Cha]SHKG | [hArg68; Cha69; Oic74; Nle75; 4-Cl— | |
| [Oic][Nle]P[4-Cl—F] | F77]Apelin-17(61-77) | |
| [Pra]KFRRQRP[hArg][Cha]SHKG[Oic] | [Pra60; hArg68; Cha69; Oic74; Nle75; 4- | 248 |
| [Nle]P[4-Cl—F] | Cl—F77]Apelin-17(60-77) | |
| [Pra]PGPWQGGRRKFRRQRP[hArg] | [Pra51; hArg68; Cha69; Oic74; Nle75; 4- | 249 |
| [Cha]SHKG[Oic][Nle]P[4-Cl—F] | Cl—F77]Apelin-26(51-77) | |
| [Pra]LVQPRGSRNGPGPWQGGRRKFRRQRP | [Pra41; hArg68; Cha69; Oic74; Nle75; 4- | 250 |
| [hArg][Cha]SHKG[Oic][Nle] | Cl—F77]Apelin-36(41-77) | |
| P[4-Cl—F] | | |
| [Pra]KF[hArg][hArg]QRP[hArg][Cha] | Pra- | 251 |
| SHKG[Oic][Nle]P[4-Cl—F] | [hArg63, 64, 68; Cha69; Oic74; Nle75; 4- | |
| | Cl—F77]Apelin-17(61-77) | |
| [Pra]KF[hArg][hArg]Q[hArg]P[hArg] | Pra- | 252 |
| [Cha]SHKG[Oic][Nle]P[4-Cl—F] | [hArg63, 64, 66, 68; Cha69; Oic74; Nle75; 4- | |
| | Cl—F77]Apelin-17(61-77) | |
| [Pra]KF[hArg][hArg]QQP[hArg][Cha] | Pra- | 253 |
| SHKG[Oic][Nle]P[4-Cl—F] | [hArg63, 64, 68; Gln66; Cha69; Oic74; | |
| | Nle75; 4-Cl—F77]Apelin-17(61-77) | |
| [Pra]KF[hArg][hArg]Q[Cit]P[hArg] | Pra- | 254 |
| [Cha]SHKG[Oic][Nle]P[4-Cl—F] | [hArg63, 64, 68; Cit66; Cha69; Oic74; | |
| | Nle75; 4-Cl—F77]Apelin-17(61-77) | |
| [Pra]KF[hArg][Cit]Q[Cit]P[hArg][Cha] | Pra- | 255 |
| SHKG[Oic][Nle]P[4-Cl—F] | [hArg63, 68; Cit64, 66; Cha69; Oic74; | |
| | Nle75; 4-Cl—F77]Apelin-17(61-77) | |
| [Pra]KF[Cit][Cit]Q[hArg]P[hArg][Cha] | Pra- | 256 |
| SHKG[Oic][Nle]P[4-Cl—F] | [Cit63, 64; hArg66, 68; Cha69; Oic74; | |
| | Nle75; 4-Cl—F77]Apelin-17(61-77) | |
| [Pra]KF[Cit][Cit]Q[Cit]P[hArg][Cha] | Pra- | 257 |
| SHKG[Oic][Nle]P[4-Cl—F] | [Cit63, 64, 66; hArg68; Cha69; Oic74; | |
| | Nle75; 4-Cl—F77]Apelin-17(61-77) | |
| [Pra]OFRRQRP[hArg][Cha]SHKG[Oic] | Pra- | 258 |
| [Nle]P[4-Cl—F] | [Orn61; hArg68; Cha69; Oic74; Nle75; 4- | |
| | Cl—F77]Apelin-17(61-77) | |
| [Pra]OF[hArg][hArg]Q[hArg]P[hArg] | Pra- | 259 |
| [Cha]SHKG[Oic][Nle]P[4-Cl—F] | [Orn61; hArg63, 64, 66, 68; Cha69; Oic74; | |
| | Nle75; 4-Cl—F77]Apelin-17(61-77) | |
| [Pra]FRRQRP[hArg][Cha]SHKG[Oic] | [Pra61; hArg68; Cha69; Oic74; Nle75; 4- | 260 |
| [Nle]P[4-Cl—F] | Cl—F77]Apelin-17(61-77) | |
| {Bromoacetyl} [NPeg11]LRP[hArg] | Bromoacetyl-NPeg11- | 261 |
| [Cha]SHKG [Oic][Nle]P[4-Cl— | [Leu65; hArg68; Cha69; Oic74; Nle75; 4- | |
| F] {Free Acid} | Cl—F77]Apelin-13(65-77) | |
| {Bromoacetyl}[NPeg11]KFRRQRP | Bromoacetyl-NPeg11- | 262 |
| [hArg][Cha]SHKG[Oic][Nle]P[4-Cl— | [hArg68; Cha69; Oic74; Nle75; 4-Cl— | |
| F]{Free Acid} | F77]Apelin-17(61-77) | |
| {Mercaptopropionyl}KFRRQRP[hArg] | Mercaptopropionyl- | 263 |
| [Cha]SHKG[Oic][Nle]P[4-Cl— | [hArg68; Cha69; Oic74; Nle75; 4-Cl— | |
| F]{FreeAcid} | F77]Apelin-17(61-77) | |
| {Mercaptopropionyl}FRRQRP[hArg] | Mercaptopropionyl- | 264 |
| [Cha]SHKG[Oic][Nle]P[4-Cl— | [hArg68; Cha69; Oic74; Nle75; 4-Cl— | |
| F]{FreeAcid} | F77]Apelin-17(62-77) | |
| {Mercaptopropionyl}RRQRP[hArg] | Mercaptopropionyl- | 265 |
| [Cha]SHKG[Oic][Nle]P[4-Cl— | [hArg68; Cha69; Oic74; Nle75; 4-Cl— | |
| F]{FreeAcid} | F77]Apelin-17(63-77) | |
| {Mercaptopropionyl}RQRP[hArg] | Mercaptopropionyl- | 266 |
| [Cha]SHKG[Oic][Nle]P[4-Cl—F]{FreeAcid} | [hArg68; Cha69; Oic74; Nle75; 4-Cl— | |
| | F77]Apelin-17(64-77) | |
| {Mercaptopropionyl}QRP[hArg][Cha] | Mercaptopropionyl- | 267 |
| SHKG[Oic][Nle]P[4-Cl—F]{FreeAcid} | [hArg68; Cha69; Oic74; Nle75; 4-Cl— | |
| | F77]Apelin-17(65-77) | |
| {Mercaptopropionyl}LRP[hArg][Cha] | Mercaptopropionyl- | 268 |
| SHKG[Oic][Nle]P[4-Cl—F]{FreeAcid} | [Leu65; hArg68; Cha69; Oic74; Nle75; 4- | |
| | Cl—F77]Apelin-17(65-77) | |
| {Mercaptopropionyl}LLRP[hArg][Cha] | Mercaptopropionyl- | 269 |
| SHKG[Oic][Nle]P[4-Cl—F]{FreeAcid} | [Leu65; hArg68; Cha69; Oic74; Nle75; 4- | |
| | Cl—F77]Apelin-17(65-77) | |
| {Pra}LRP[hArg][Cha]SHKG[Oic][Nle] | Pra- | 270 |
| P[4-Cl—F]{FreeAcid} | [Leu65; hArg68; Cha69; Oic74; Nle75; 4- | |
| | Cl—F77]Apelin-17(65-77) | |
| [PE]RP[hArg][Cha][Pra]HKG[Oic][Nle] | [PE65; hArg68; Cha69; Pra70; Oic74; | 271 |
| P[4-Cl—F]{FreeAcid} | Nle75; 4-Cl—F77]Apelin-13(65-77) | |
| [PE]RP[hArg][Cha]S[Pra]KG[Oic][Nle] | [PE65; hArg68; Cha69; Pra71; Oic74; | 272 |
| P[4-Cl—F]{FreeAcid} | Nle75; 4-Cl—F77]Apelin-13(65-77) | |
| {MeS- | 3-(methylthio)propionyl- | 273 |
| Propionyl}KFRRLRP[hArg][Cha]SHKG | [Leu65; hArg68; Cha69; Oic74; Nle75; 4- | |
| [Oic][Nle]P[4-Cl—F] | Cl—F77]Apelin-17(61-77) | |
| {MeS- | 3-(methylthio)propionyl- | 274 |
| Propionyl}KFRRARP[hArg][Cha]SHKG | [Ala65; hArg68; Cha69; Oic74; Nle75; 4- | |
| [Oic][Nle]P[4-Cl—F] | Cl—F77]Apelin-17(61-77) | |
| {MeS- | 3-(methylthio)propionyl- | 275 |
| Propionyl}KFRRVRP[hArg][Cha]SHKG | [Val65; hArg68; Cha69; Oic74; Nle75; 4- | |
| [Oic][Nle]P[4-Cl—F] | Cl—F77]Apelin-17(61-77) | |
| {MeS- | 3-(methylthio)propionyl- | 276 |
| Propionyl}KFRRIRP[hArg][Cha]SHKG | [Ile65; hArg68; Cha69; Oic74; Nle75; 4- | |
| [Oic][Nle]P[4-Cl—F] | Cl—F77]Apelin-17(61-77) | |
| {MeS- | 3-(methylthio)propionyl- | 277 |
| Propionyl}KFRRFRP[hArg][Cha]SHKG | [Phe65; hArg68; Cha69; Oic74; Nle75; 4- | |
| [Oic][Nle]P[4-Cl—F] | Cl—F77]Apelin-17(61-77) | |
| {MeS- | 3-(methylthio)propionyl- | 278 |
| Propionyl}KFRRYRP[hArg][Cha]SHKG | [Tyr65; hArg68; Cha69; Oic74; Nle75; 4- | |
| [Oic][Nle]P[4-Cl—F] | Cl—F77]Apelin-17(61-77) | |
| {MeS- | 3-(methylthio)propionyl- | 279 |
| Propionyl}KFRRL[hArg]P[hArg][Cha] | [Leu65; hArg66, 68; Cha69; Oic74; Nle75; | |
| SHKG[Oic][Nle]P[4-Cl—F] | 4-Cl—F77]Apelin-17(61-77) | |
| {MeS- | 3-(methylthio)propionyl- | 280 |
| Propionyl}KFRKLRP[hArg][Cha]SHKG | [Lys64; Leu65; hArg68; Cha69; Oic74; | |
| [Oic][Nle]P[4-Cl—F] | Nle75; 4-Cl—F77]Apelin-17(61-77) | |
| {MeS- | 3-(methylthio)propionyl- | 281 |
| Propionyl}KFR[Orn]LRP[hArg][Cha] | [Orn64; Leu65; hArg68; Cha69; Oic74; | |
| SHKG[Oic][Nle]P[4-Cl—F] | Nle75; 4-Cl—F77]Apelin-17(61-77) | |
| {MeS- | 3-(methylthio)propionyl- | 282 |
| Propionyl}KFRHLRP[hArg][Cha]SHKG | [His64; Leu65; hArg68; Cha69; Oic74; | |
| [Oic][Nle]P[4-Cl—F] | Nle75; 4-Cl—F77]Apelin-17(61-77) | |
| {MeS- | 3-(methylthio)propionyl- | 283 |
| Propionyl}KFRWLRP[hArg][Cha] | [Trp64; Leu65; hArg68; Cha69; Oic74; | |
| SHKG[Oic][Nle]P[4-Cl—F] | Nle75; 4-Cl—F77]Apelin-17(61-77) | |
| {MeS- | 3-(methylthio)propionyl- | 284 |
| Propionyl}KFRFLRP[hArg][Cha]SHKG | [Phe64; Leu65; hArg68; Cha69; Oic74; | |
| [Oic][Nle]P[4-Cl—F] | Nle75; 4-Cl—F77]Apelin-17(61-77) | |
| {MeS- | 3-(methylthio)propionyl- | 285 |
| Propionyl}KFRYLRP[hArg][Cha]SHKG | [Tyr64; Leu65; hArg68; Cha69; Oic74; | |
| [Oic][Nle]P[4-Cl—F] | Nle75; 4-Cl—F77]Apelin-17(61-77) | |
| {MeS- | 3-(methylthio)propionyl- | 286 |
| Propionyl}KFR[3Pal]LRP[hArg][Cha] | [3Pal64; Leu65; hArg68; Cha69; Oic74; | |
| SHKG[Oic][Nle]P[4-Cl—F] | Nle75; 4-Cl—F77]Apelin-17(61-77) | |
| {MeS- | 3-(methylthio)propionyl- | 287 |
| Propionyl}KFR[2Pal]LRP[hArg][Cha] | [2Pal64; Leu65; hArg68; Cha69; Oic74; | |
| SHKG[Oic][Nle]P[4-Cl—F] | Nle75; 4-Cl—F77]Apelin-17(61-77) | |
| {MeS- | 3-(methylthio)propionyl- | 288 |
| Propionyl}KFHRLRP[hArg][Cha]SHKG | [His63; Leu65; hArg68; Cha69; Oic74; | |
| [Oic][Nle]P[4-Cl—F] | Nle75; 4-Cl—F77]Apelin-17(61-77) | |
| {MeS- | 3-(methylthio)propionyl- | 289 |
| Propionyl}KFWRLRP[hArg][Cha] | [Trp63; Leu65; hArg68; Cha69; Oic74; | |
| SHKG[Oic][Nle]P[4-Cl—F] | Nle75; 4-Cl—F77]Apelin-17(61-77) | |
| {MeS- | 3-(methylthio)propionyl- | 290 |
| Propionyl}KFFRLRP[hArg][Cha]SHKG | [Phe63; Leu65; hArg68; Cha69; Oic74; | |
| [Oic][Nle]P[4-Cl—F] | Nle75; 4-Cl—F77]Apelin-17(61-77) | |
| {MeS- | 3-(methylthio)propionyl- | 291 |
| Propionyl}KFYRLRP[hArg][Cha]SHKG | [Tyr63; Leu65; hArg68; Cha69; Oic74; | |
| [Oic][Nle]P[4-Cl—F] | Nle75; 4-Cl—F77]Apelin-17(61-77) | |
| {MeS- | 3-(methylthio)propionyl- | 292 |
| Propionyl}KF[3Pal]RLRP[hArg][Cha] | [3Pal63; Leu65; hArg68; Cha69; Oic74; | |
| SHKG[Oic][Nle]P[4-Cl—F] | Nle75; 4-Cl—F77]Apelin-17(61-77) | |
| {MeS- | 3-(methylthio)propionyl- | 293 |
| Propionyl}KF[2Pal]RLRP[hArg][Cha] | [2Pal63; Leu65; hArg68; Cha69; Oic74; | |
| SHKG[Oic][Nle]P[4-Cl—F] | Nle75; 4-Cl—F77]Apelin-17(61-77) | |
| {MeS- | 3-(methylthio)propionyl- | 294 |
| Propionyl}FRKLRP[hArg][Cha]SHKG | [Lys64; Leu65; hArg68; Cha69; Oic74; | |
| [Oic][Nle]P[4-Cl—F] | Nle75; 4-Cl—F77]Apelin-17(62-77) | |
| {MeS- | 3-(methylthio)propionyl- | 295 |
| Propionyl}FR[Orn]LRP[hArg][Cha] | [Orn64; Leu65; hArg68; Cha69; Oic74; | |
| SHKG[Oic][Nle]P[4-Cl—F] | Nle75; 4-Cl—F77]Apelin-17(62-77) | |
| {MeS- | 3-(methylthio)propionyl- | 296 |
| Propionyl}FRHLRP[hArg][Cha]SHKG | [His64; Leu65; hArg68; Cha69; Oic74; | |
| [Oic][Nle]P[4-Cl—F] | Nle75; 4-Cl—F77]Apelin-17(62-77) | |
| {MeS- | 3-(methylthio)propionyl- | 297 |
| Propionyl}FRWLRP[hArg][Cha]SHKG | [Trp64; Leu65; hArg68; Cha69; Oic74; | |
| [Oic][Nle]P[4-Cl—F] | Nle75; 4-Cl—F77]Apelin-17(62-77) | |
| {MeS- | 3-(methylthio)propionyl- | 298 |
| Propionyl}FRFLRP[hArg][Cha]SHKG | [Phe64; Leu65; hArg68; Cha69; Oic74; | |
| [Oic][Nle]P[4-Cl—F] | Nle75; 4-Cl—F77]Apelin-17(62-77) | |
| {MeS- | 3-(methylthio)propionyl- | 299 |
| Propionyl}FRYLRP[hArg][Cha]SHKG | [Tyr64; Leu65; hArg68; Cha69; Oic74; | |
| [Oic][Nle]P[4-Cl—F] | Nle75; 4-Cl—F77]Apelin-17(62-77) | |
| {MeS- | 3-(methylthio)propionyl- | 300 |
| Propionyl}FKRLRP[hArg][Cha]SHKG | [Lys63; Leu65; hArg68; Cha69; Oic74; | |
| [Oic][Nle]P[4-Cl—F] | Nle75; 4-Cl—F77]Apelin-17(62-77) | |
| {MeS- | 3-(methylthio)propionyl- | 301 |
| Propionyl}F[Orn]RLRP[hArg][Cha] | [Orn63; Leu65; hArg68; Cha69; Oic74; | |
| SHKG[Oic][Nle]P[4-Cl—F] | Nle75; 4-Cl—F77]Apelin-17(62-77) | |
| {MeS- | 3-(methylthio)propionyl- | 302 |
| Propionyl}FHRLRP[hArg][Cha]SHKG | [His 63; Leu65; hArg68; Cha69; Oic74; | |
| [Oic][Nle]P[4-Cl—F] | Nle75; 4-Cl—F77]Apelin-17(62-77) | |
| {MeS- | 3-(methylthio)propionyl- | 303 |
| Propionyl}FWRLRP[hArg][Cha] | [Trp63; Leu65; hArg68; Cha69; Oic74; | |
| SHKG[Oic][Nle]P[4-Cl—F] | Nle75; 4-Cl—F77]Apelin-17(62-77) | |
| {MeS- | 3-(methylthio)propionyl- | 304 |
| Propionyl}FFRLRP[hArg][Cha]SHKG | [Phe63; Leu65; hArg68; Cha69; Oic74; | |
| [Oic][Nle]P[4-Cl—F] | Nle75; 4-Cl—F77]Apelin-17(62-77) | |
| {MeS- | 3-(methylthio)propionyl- | 305 |
| Propionyl}FYRLRP[hArg][Cha]SHKG | [Tyr63; Leu65; hArg68; Cha69; Oic74; | |
| [Oic][Nle]P[4-Cl—F] | Nle75; 4-Cl—F77]Apelin-17(62-77) | |
| {MeS- | 3-(methylthio)propionyl- | 306 |
| Propionyl}F[3Pal]RLRP[hArg][Cha] | [3Pal63; Leu65; hArg68; Cha69; Oic74; | |
| SHKG[Oic][Nle]P[4-Cl—F] | Nle75; 4-Cl—F77]Apelin-17(62-77) | |
| {MeS- | 3-(methylthio)propionyl- | 307 |
| Propionyl}F[2Pal]RLRP[hArg][Cha] | [2Pal63; Leu65; hArg68; Cha69; Oic74; | |
| SHKG[Oic][Nle]P[4-Cl—F] | Nle75; 4-Cl—F77]Apelin-17(62-77) | |
| {MeS- | 3-(methylthio)propionyl- | 308 |
| Propionyl}KFRRL[hArg]P[hArg][Cha] | [Leu65; hArg66, 68; Cha69; Oic74; Nle75; | |
| SHKG[Oic][Nle]P[4-Cl—F] | 4-Cl—F77]Apelin-17(61-77) | |
| {MeS- | 3-(methylthio)propionyl- | 309 |
| Propionyl}FQQL[hArg]P[hArg][Cha] | [Gln63, 64; Leu65; hArg66, 68; Cha69; | |
| SHKG[Oic][Nle]P[4-Cl—F] | Oic74; Nle75; 4-Cl—F77]Apelin-17(62-77) | |
| {MeS- | 3-(methylthio)propionyl- | 310 |
| Propionyl}KF[Cit][Cit]L[hArg]P[hArg] | [Cit63, 64; Leu65; hArg66, 68; Cha69; | |
| [Cha]SHKG[Oic][Nle]P[4-Cl—F] | Oic74; Nle75; 4-Cl—F77]Apelin-17(61-77) | |
| {MeS- | 3-(methylthio)propionyl- | 311 |
| Propionyl}F[Cit][Cit]L[hArg]P[hArg] | [Cit63, 64; Leu65; hArg66, 68; Cha69; | |
| [Cha]SHKG[Oic][Nle]P[4-Cl—F] | Oic74; Nle75; 4-Cl—F77]Apelin-17(62-77) | |
| {MeS- | 3-(methylthio)propionyl- | 312 |
| Propionyl}KFARL[hArg]P[hArg][Cha] | [Ala63; Leu65; hArg66, 68; Cha69; Oic74; | |
| SHKG[Oic][Nle]P[4-Cl—F] | Nle75; 4-Cl—F77]Apelin-17(61-77) | |
| {MeS- | 3-(methylthio)propionyl- | 313 |
| Propionyl}KFERL[hArg]P[hArg][Cha] | [Glu63; Leu65; hArg66, 68; Cha69; Oic74; | |
| SHKG[Oic][Nle]P[4-Cl—F] | Nle75; 4-Cl—F77]Apelin-17(61-77) | |
| {MeS- | 3-(methylthio)propionyl- | 314 |
| Propionyl}KFTRL[hArg]P[hArg][Cha] | [Thr63; Leu65; hArg66, 68; Cha69; Oic74; | |
| SHKG[Oic][Nle]P[4-Cl—F] | Nle75; 4-Cl—F77]Apelin-17(61-77) | |
| {MeS- | 3-(methylthio)propionyl- | 315 |
| Propionyl}KFYRL[hArg]P[hArg][Cha] | [Tyr63; Leu65; hArg66, 68; Cha69; Oic74; | |
| SHKG[Oic][Nle]P[4-Cl—F] | Nle75; 4-Cl—F77]Apelin-17(61-77) | |
| {MeS- | 3-(methylthio)propionyl- | 316 |
| Propionyl}KFIRL[hArg]P[hArg][Cha] | [Ile63; Leu65; hArg66, 68; Cha69; Oic74; | |
| SHKG[Oic][Nle]P[4-Cl—F] | Nle75; 4-Cl—F77]Apelin-17(61-77) | |
| {MeS- | 3-(methylthio)propionyl- | 317 |
| Propionyl}KFPRL[hArg]P[hArg][Cha] | [Pro63; Leu65; hArg66, 68; Cha69; Oic74; | |
| SHKG[Oic][Nle]P[4-Cl—F] | Nle75; 4-Cl—F77]Apelin-17(61-77) | |
| {MeS- | 3-(methylthio)propionyl- | 318 |
| Propionyl}KFSRL[hArg]P[hArg][Cha] | [Ser63; Leu65; hArg66, 68; Cha69; Oic74; | |
| SHKG[Oic][Nle]P[4-Cl—F] | Nle75; 4-Cl—F77]Apelin-17(61-77) | |
| {MeS- | 3-(methylthio)propionyl- | 319 |
| Propionyl}KFFRL[hArg]P[hArg][Cha] | [Phe63; Leu65; hArg66, 68; Cha69; Oic74; | |
| SHKG[Oic][Nle]P[4-Cl—F] | Nle75; 4-Cl—F77]Apelin-17(61-77) | |
| {MeS- | 3-(methylthio)propionyl- | 320 |
| Propionyl}KFLRL[hArg]P[hArg][Cha] | [Leu63, 65; hArg66, 68; Cha69; Oic74; | |
| SHKG[Oic][Nle]P[4-Cl—F] | Nle75; 4-Cl—F77]Apelin-17(61-77) | |
| {MeS- | 3-(methylthio)propionyl- | 321 |
| Propionyl}KFVRL[hArg]P[hArg][Cha] | [Val63; Leu65; hArg66, 68; Cha69; Oic74; | |
| SHKG[Oic][Nle]P[4-Cl—F] | Nle75; 4-Cl—F77]Apelin-17(61-77) | |
| {MeS- | 3-(methylthio)propionyl- | 322 |
| Propionyl}KFRQL[hArg]P[hArg][Cha] | [Gln64; Leu65; hArg66, 68; Cha69; Oic74; | |
| SHKG[Oic][Nle]P[4-Cl—F] | Nle75; 4-Cl—F77]Apelin-17(61-77) | |
| {MeS- | 3-(methylthio)propionyl- | 323 |
| Propionyl}KFRAL[hArg]P[hArg][Cha] | [Ala64; Leu65; hArg66, 68; Cha69; Oic74; | |
| SHKG[Oic][Nle]P[4-Cl—F] | Nle75; 4-Cl—F77]Apelin-17(61-77) | |
| {MeS- | 3-(methylthio)propionyl- | 324 |
| Propionyl}KFREL[hArg]P[hArg][Cha] | [Glu64; Leu65; hArg66, 68; Cha69; Oic74; | |
| SHKG[Oic][Nle]P[4-Cl—F] | Nle75; 4-Cl—F77]Apelin-17(61-77) | |
| {MeS- | 3-(methylthio)propionyl- | 325 |
| Propionyl}KFRTL[hArg]P[hArg][Cha] | [Thr64; Leu65; hArg66, 68; Cha69; Oic74; | |
| SHKG[Oic][Nle]P[4-Cl—F] | Nle75; 4-Cl—F77]Apelin-17(61-77) | |
| {MeS- | 3-(methylthio)propionyl- | 326 |
| Propionyl}KFRYL[hArg]P[hArg][Cha] | [Tyr64; Leu65; hArg66, 68; Cha69; Oic74; | |
| SHKG[Oic][Nle]P[4-Cl—F] | Nle75; 4-Cl—F77]Apelin-17(61-77) | |
| {MeS- | 3-(methylthio)propionyl- | 327 |
| Propionyl}KFRIL[hArg]P[hArg][Cha] | [Ile64; Leu65; hArg66, 68; Cha69; Oic74; | |
| SHKG[Oic][Nle]P[4-Cl—F] | Nle75; 4-Cl—F77]Apelin-17(61-77) | |
| {MeS- | 3-(methylthio)propionyl- | 328 |
| Propionyl}KFRPL[hArg]P[hArg][Cha] | [Pro64; Leu65; hArg66, 68; Cha69; Oic74; | |
| SHKG[Oic][Nle]P[4-Cl—F] | Nle75; 4-Cl—F77]Apelin-17(61-77) | |
| {MeS- | 3-(methylthio)propionyl- | 329 |
| Propionyl}KFRSL[hArg]P[hArg][Cha] | [Ser64; Leu65; hArg66, 68; Cha69; Oic74; | |
| SHKG[Oic][Nle]P[4-Cl—F] | Nle75; 4-Cl—F77]Apelin-17(61-77) | |
| {MeS- | 3-(methylthio)propionyl- | 330 |
| Propionyl}KFRFL[hArg]P[hArg][Cha] | [Phe64; Leu65; hArg66, 68; Cha69; Oic74; | |
| SHKG[Oic][Nle]P[4-Cl—F] | Nle75; 4-Cl—F77]Apelin-17(61-77) | |
| {MeS- | 3-(methylthio)propionyl- | 331 |
| Propionyl}KFRLL[hArg]P[hArg][Cha] | [Leu64, 65; hArg66, 68; Cha69; Oic74; | |
| SHKG[Oic][Nle]P[4-Cl—F] | Nle75; 4-Cl—F77]Apelin-17(61-77) | |
| {MeS- | 3-(methylthio)propionyl- | 332 |
| Propionyl}KFRVL[hArg]P[hArg][Cha] | [Val64; Leu65; hArg66, 68; Cha69; Oic74; | |
| SHKG[Oic][Nle]P[4-Cl—F] | Nle75; 4-Cl—F77]Apelin-17(61-77) | |
| {MeS- | 3-(methylthio)propionyl- | 333 |
| Propionyl}FARL[hArg]P[hArg][Cha] | [Ala63; Leu65; hArg66, 68; Cha69; Oic74; | |
| SHKG[Oic][Nle]P[4-Cl—F] | Nle75; 4-Cl—F77]Apelin-17(62-77) | |
| {MeS- | 3-(methylthio)propionyl- | 334 |
| Propionyl}FERL[hArg]P[hArg][Cha] | [Glu63; Leu65; hArg66, 68; Cha69; Oic74; | |
| SHKG[Oic][Nle]P[4-Cl—F] | Nle75; 4-Cl—F77]Apelin-17(62-77) | |
| {MeS- | 3-(methylthio)propionyl- | 335 |
| Propionyl}FTRL[hArg]P[hArg][Cha] | [Thr63; Leu65; hArg66, 68; Cha69; Oic74; | |
| SHKG[Oic][Nle]P[4-Cl—F] | Nle75; 4-Cl—F77]Apelin-17(62-77) | |
| {MeS- | 3-(methylthio)propionyl- | 336 |
| Propionyl}FYRL[hArg]P[hArg][Cha] | [Tyr63; Leu65; hArg66, 68; Cha69; Oic74; | |
| SHKG[Oic][Nle]P[4-Cl—F] | Nle75; 4-Cl—F77]Apelin-17(62-77) | |
| {MeS- | 3-(methylthio)propionyl- | 337 |
| Propionyl}FIRL[hArg]P[hArg][Cha] | [Ile63; Leu65; hArg66, 68; Cha69; Oic74; | |
| SHKG[Oic][Nle]P[4-Cl—F] | Nle75; 4-Cl—F77]Apelin-17(62-77) | |
| {MeS- | 3-(methylthio)propionyl- | 338 |
| Propionyl}FPRL[hArg]P[hArg][Cha] | [Pro63; Leu65; hArg66, 68; Cha69; Oic74; | |
| SHKG[Oic][Nle]P[4-Cl—F] | Nle75; 4-Cl—F77]Apelin-17(62-77) | |
| {MeS- | 3-(methylthio)propionyl- | 339 |
| Propionyl}FSRL[hArg]P[hArg][Cha] | [Ser63; Leu65; hArg66, 68; Cha69; Oic74; | |
| SHKG[Oic][Nle]P[4-Cl—F] | Nle75; 4-Cl—F77]Apelin-17(62-77) | |
| {MeS- | 3-(methylthio)propionyl- | 340 |
| Propionyl}FFRL[hArg]P[hArg][Cha] | [Phe63; Leu65; hArg66, 68; Cha69; Oic74; | |
| SHKG[Oic][Nle]P[4-Cl—F] | Nle75; 4-Cl—F77]Apelin-17(62-77) | |
| {MeS- | 3-(methylthio)propionyl- | 341 |
| Propionyl}FLRL[hArg]P[hArg][Cha] | [Leu63; Leu65; hArg66, 68; Cha69; Oic74; | |
| SHKG[Oic][Nle]P[4-Cl—F] | Nle75; 4-Cl—-F77]Apelin-17(62-77) | |
| {MeS- | 3-(methylthio)propionyl- | 342 |
| Propionyl}FVRL[hArg]P[hArg][Cha] | [Val63; Leu65; hArg66, 68; Cha69; Oic74; | |
| SHKG[Oic][Nle]P[4-Cl—F] | Nle75; 4-Cl—F77]Apelin-17(62-77) | |
| {MeS- | 3-(methylthio)propionyl- | 343 |
| Propionyl}FRQL[hArg]P[hArg][Cha] | [Gln64; Leu65; hArg66, 68; Cha69; Oic74; | |
| SHKG[Oic][Nle]P[4-Cl—F] | Nle75; 4-Cl—F77]Apelin-17(62-77) | |
| {MeS- | 3-(methylthio)propionyl- | 344 |
| Propionyl}FRAL[hArg]P[hArg][Cha] | [Ala64; Leu65; hArg66, 68; Cha69; Oic74; | |
| SHKG[Oic][Nle]P[4-Cl—F] | Nle75; 4-Cl—F77]Apelin-17(62-77) | |
| {MeS- | 3-(methylthio)propionyl- | 345 |
| Propionyl}FREL[hArg]P[hArg][Cha] | [Glu64; Leu65; hArg66, 68; Cha69; Oic74; | |
| SHKG[Oic][Nle]P[4-Cl—F] | Nle75; 4-Cl—F77]Apelin-17(62-77) | |
| {MeS- | 3-(methylthio)propionyl- | 346 |
| Propionyl}FRTL[hArg]P[hArg][Cha] | [Thr64; Leu65; hArg66, 68; Cha69; Oic74; | |
| SHKG[Oic][Nle]P[4-Cl—F] | Nle75; 4-Cl—F77]Apelin-17(62-77) | |
| {MeS- | 3-(methylthio)propionyl- | 347 |
| Propionyl}FRYL[hArg]P[hArg][Cha] | [Tyr64; Leu65; hArg66, 68; Cha69; Oic74; | |
| SHKG[Oic][Nle]P[4-Cl—F] | Nle75; 4-Cl—F77]Apelin-17(62-77) | |
| {MeS- | 3-(methylthio)propionyl- | 348 |
| Propionyl}FRIL[hArg]P[hArg][Cha] | [Ile64; Leu65; hArg66, 68; Cha69; Oic74; | |
| SHKG[Oic][Nle]P[4-Cl—F] | Nle75; 4-Cl—F77]Apelin-17(62-77) | |
| {MeS- | 3-(methylthio)propionyl- | 349 |
| Propionyl}FRPL[hArg]P[hArg][Cha] | [Pro64; Leu65; hArg66, 68; Cha69; Oic74; | |
| SHKG[Oic][Nle]P[4-Cl—F] | Nle75; 4-Cl—F77]Apelin-17(62-77) | |
| {MeS- | 3-(methylthio)propionyl- | 350 |
| Propionyl}FRSL[hArg]P[hArg][Cha] | [Ser64; Leu65; hArg66, 68; Cha69; Oic74; | |
| SHKG[Oic][Nle]P[4-Cl—F] | Nle75; 4-Cl—F77]Apelin-17(62-77) | |
| {MeS- | 3-(methylthio)propionyl- | 351 |
| Propionyl}FRFL[hArg]P[hArg][Cha] | [Phe64; Leu65; hArg66, 68; Cha69; Oic74; | |
| SHKG[Oic][Nle]P[4-Cl—F] | Nle75; 4-Cl—F77]Apelin-17(62-77) | |
| {MeS- | 3-(methylthio)propionyl- | 352 |
| Propionyl}FRLL[hArg]P[hArg][Cha] | [Leu64, 65; hArg66, 68; Cha69; Oic74; | |
| SHKG[Oic][Nle]P[4-Cl—F] | Nle75; 4-Cl—F77]Apelin-17(62-77) | |
| {MeS- | 3-(methylthio)propionyl- | 353 |
| Propionyl}FRVL[hArg]P[hArg][Cha] | [Val64; Leu65; hArg66, 68; Cha69; Oic74; | |
| SHKG[Oic][Nle]P[4-Cl—F] | Nle75; 4-Cl—F77]Apelin-17(62-77) | |
| {MeS- | 3-(methylthio)propionyl- | 354 |
| Propionyl}KFRRQRP[hArg][Cha] | [hArg68; Cha69; Oic74; Nle75]Apelin- | |
| SHKG[Oic][Nle]P{Amide} | 17(61-76)-Amide | |
| {MeS- | 3-(methylthio)propionyl- | 355 |
| Propionyl}KF[Cit][Cit]L[hArg]P[hArg] | [Cit63, 64; Leu65; hArg66, 68; Cha69; | |
| [Cha]SHKG[Oic][Nle]P{Amide} | Oic74; Nle75]Apelin-17(61-76)-Amide | |
| {MeS- | 3-(methylthio)propionyl- | 356 |
| Propionyl}F[Cit][Cit]L[hArg]P[hArg] | [Cit63, 64; Leu65; hArg66, 68; Cha69; | |
| [Cha]SHKG[Oic][Nle]P{Amide} | Oic74; Nle75]Apelin-17(62-76)-Amide | |
| {MeS- | 3-(methylthio)propionyl- | 357 |
| Propionyl}KFRRL[hArg]P[hArg][Cha] | [Leu65; hArg66, 68; Cha69; Oic74; Nle75] | |
| SHKG[Oic][Nle]P{Amide} | Apelin-17(61-76)-Amide | |
| {MeS- | 3-(methylthio)propionyl- | 358 |
| Propionyl}FQQL[hArg]P[hArg][Cha] | [Gln63, 64; Leu65; hArg66, 68; Cha69; | |
| SHKG[Oic][Nle]P{Amide} | Oic74; Nle75]Apelin-17(62-76)-Amide | |
| {MeS- | 3-(methylthio)propionyl- | 359 |
| Propionyl}FRRQRP[hArg][Cha]SHKG | [hArg68; Cha69; Oic74; Nle75; 4-Cl— | |
| [Oic][Nle]P[4-Cl—F]{COOH} | F77]Apelin-17(62-77) | |
| {MeS- | [hArg63, 64, 66, 68; Cha69; Oic74; Nle75; | 360 |
| Propionyl}F[hArg][hArg]Q[hArg]P | 4-Cl—F77]Apelin-17(62-77) | |
| [hArg][Cha]SHKG[Oic][Nle]P[4-Cl— | | |
| F]{COOH} | | |
| {MeS- | 3-(methylthio)propionyl- | 361 |
| Propionyl}A[hArg][hArg]Q[hArg]P | [Ala62; hArg63, 64, 66, 68; Cha69; Oic74; | |
| [hArg][Cha]SHKG[Oic][Nle]P[4-Cl— | Nle75; 4-Cl—F77]Apelin-17(62-77) | |
| F]{COOH} | | |
| {MeS- | 3-(methylthio)propionyl- | 362 |
| Propionyl}FAQ[hArg]P[hArg][Cha] | [Phe63; Ala64; hArg66, 68; Cha69; Oic74; | |
| SHKG[Oic][Nle]P[4-Cl—F]{COOH} | Nle75; 4-Cl—F77]Apelin-17(63-77) | |
| {MeS- | 3-(methylthio)propionyl- | |
| Propionyl}F[hArg]AQ[hArg]P[hArg] | [hArg63, 66, 68; Ala64; Cha69; Oic74; | 363 |
| [Cha]SHKG[Oic][Nle]P[4-Cl— | Nle75; 4-Cl—F77]Apelin-17(62-77) | |
| F]{COOH} | | |
| {MeS- | 3-(methylthio)propionyl- | 364 |
| Propionyl}F[hArg][hArg]A[hArg]P | [hArg63, 64, 66, 68; Ala65; Cha69; Oic74; | |
| [hArg][Cha]SHKG[Oic][Nle]P[4-Cl— | Nle75; 4-Cl—F77]Apelin-17(62-77) | |
| F]{COOH} | | |
| {MeS- | 3-(methylthio)propionyl- | 365 |
| Propionyl}F[hArg][hArg]QAP[hArg] | [hArg63, 64, 68; Ala66; Cha69; Oic74; | |
| [Cha]SHKG[Oic][Nle]P[4-Cl— | Nle75; 4-Cl—F77]Apelin-17(62-77) | |
| F]{COOH} | | |
| {MeS- | 3-(methylthio)propionyl- | 366 |
| Propionyl}F[hArg][hArg]Q[hArg]P | [hArg63, 64, 66, 68; Cha69; K(NPeg11)70; | |
| [hArg][Cha][K(NPeg11)]HKG[Oic][Nle]P | Oic74; Nle75; 4-Cl—F77]Apelin-17(62- | |
| [4-Cl—F]{COOH} | 77) | |
| {MeS- | 3-(methylthio)propionyl- | 367 |
| Propionyl}F[hArg][hArg]Q[hArg]P | [hArg63, 64, 66, 68; Cha69; K(NPeg11)71; | |
| [hArg][Cha]S[K(NPeg11)]KG[Oic][Nle]P | Oic74; Nle75; 4-Cl—F77]Apelin-17(62- | |
| [4-Cl—F]{COOH} | 77) | |
| {MeS- | 3-(methylthio)propionyl- | 368 |
| Propionyl}F[hArg][hArg]Q[hArg]P | [hArg63, 64, 66, 68; Cha69; Atz(PEG10)70; | |
| [hArg][Cha][Atz(PEG10)]HKG[Oic][Nle]P | Oic74; Nle75; 4-Cl—F77]Apelin-17(62- | |
| [4-Cl—F]{COOH} | 77) | |
| {MeS- | 3-(methylthio)propionyl- | 369 |
| Propionyl}F[hArg][hArg]Q[hArg]P | [hArg63, 64, 66, 68; Cha69; Atz(PEG10)71; | |
| [hArg][Cha]S[Atz(PEG10)]KG[Oic][Nle]P | Oic74; Nle75; 4-Cl—F77]Apelin-17(62- | |
| [4-Cl—F]{COOH} | 77) | |
| {MeS- | 3-(methylthio)propionyl- | 370 |
| Propionyl}F[hArg][hArg]Q[hArg]P | [hArg63, 64, 66, 68; Cha69; Thr70; Oic74; | |
| [hArg][Cha]THKG[Oic][Nle]P[4-Cl— | Nle75; 4-Cl—F77]Apelin-17(62-77) | |
| F]{COOH} | | |
| {MeS- | 3-(methylthio)propionyl- | 371 |
| Propionyl}F[hArg][hArg]Q[hArg]P | [hArg63, 64, 66, 68; Cha69; Ala70; Oic74; | |
| [hArg][Cha]AHKG[Oic][Nle]P[4-Cl— | Nle75; 4-Cl—F77]Apelin-17(62-77) | |
| F]{COOH} | | |
| {MeS- | 3-(methylthio)propionyl- | 372 |
| Propionyl}F[hArg][hArg]Q[hArg]P | [hArg63, 64, 66, 68; Cha69; Abu70; Oic74; | |
| [hArg][Cha][Abu]HKG[Oic][Nle]P[4-Cl— | Nle75; 4-Cl—F77]Apelin-17(62-77) | |
| F]{COOH} | | |
| {MeS- | 3-(methylthio)propionyl- | 373 |
| Propionyl}F[hArg][hArg]Q[hArg]P | [hArg63, 64, 66, 68; Cha69; Nle70, 75; | |
| [hArg][Cha][Nle]HKG[Oic][Nle]P[4-Cl— | Oic74; 4-Cl—F77]Apelin-17(62-77) | |
| F]{COOH} | | |
| {MeS- | 3-(methylthio)propionyl- | 374 |
| Propionyl}F[hArg][hArg]Q[hArg]P | [hArg63, 64, 66, 68; Cha69; Nva70; Oic74; | |
| [hArg][Cha][Nva]HKG[Oic][Nle]P[4-Cl— | Nle75; 4-Cl—F77]Apelin-17(62-77) | |
| F]{COOH} | | |
| {MeS- | 3-(methylthio)propionyl- | 375 |
| Propionyl}F[hArg][hArg]Q[hArg]P | [hArg63, 64, 66, 68; Cha69; Val70; Oic74; | |
| [hArg][Cha]VHKG[Oic][Nle]P[4-Cl— | Nle75; 4-Cl—F77]Apelin-17(62-77) | |
| F]{COOH} | | |
| {MeS- | 3-(methylthio)propionyl- | 376 |
| Propionyl}F[hArg][hArg]Q[hArg]P | [hArg63, 64, 66, 68; Cha69; Gly70; Oic74; | |
| [hArg][Cha]GHKG[Oic][Nle]P[4-Cl— | Nle75; 4-Cl—F77]Apelin-17(62-77) | |
| F]{COOH} | | |
| {MeS- | 3-(methylthio)propionyl- | 378 |
| Propionyl}F[hArg][hArg]Q[hArg]P | [hArg63, 64, 66, 68; Cha69; Leu70; Oic74; | |
| [hArg][Cha]LHKG[Oic][Nle]P[4-Cl— | Nle75; 4-Cl—F77]Apelin-17(62-77) | |
| F]{COOH} | | |
| {MeS- | 3-(methylthio)propionyl- | 379 |
| Propionyl}F[hArg][hArg]Q[hArg]P | [hArg63, 64, 66, 68; Cha69; Ile70; Oic74; | |
| [hArg][Cha]IHKG[Oic][Nle]P[4-Cl— | Nle75; 4-Cl—F77]Apelin-17(62-77) | |
| F]{COOH} | | |
| {MeS- | 3-(methylthio)propionyl- | 380 |
| Propionyl}F[hArg][hArg]Q[hArg]P | [hAr63, 64, 66, 68; Cha69; CPG70; Oic74; | |
| [hArg][Cha][CPG]HKG[Oic][Nle]P[4-Cl— | Nle75; 4-Cl—F77]Apelin-17(62-77) | |
| F]{COOH} | | |
| {MeS- | 3-(methylthio)propionyl- | 381 |
| Propionyl}F[hArg][hArg]Q[hArg]P | [hArg63, 64, 66, 68; Cha69; Chg70; Oic74; | |
| [hArg][Cha][Chg]HKG[Oic][Nle]P[4-Cl— | Nle75; 4-Cl—F77]Apelin-17(62-77) | |
| F]{COOH} | | |
| {MeS- | 3-(methylthio)propionyl- | 382 |
| Propionyl}F[hArg][hArg]Q[hArg]P | [hArg63, 64, 66, 68; Cha69, 70; Oic74; | |
| [hArg][Cha][Cha]HKG[Oic][Nle]P[4-Cl— | Nle75; 4-Cl—F77]Apelin-17(62-77) | |
| F]{COOH} | | |
| {MeS- | 3-(methylthio)propionyl- | 383 |
| Propionyl}F[hArg][hArg]Q[hArg]P | [hArg63, 64, 66, 68; Cha69; His70; Oic74; | |
| [hArg][Cha]HHKG[Oic][Nle]P[4-Cl— | Nle75; 4-Cl—F77]Apelin-17(62-77) | |
| F]{COOH} | | |
| {MeS- | 3-(methylthio)propionyl- | 384 |
| Propionyl}F[hArg][hArg]Q[hArg]P | [hArg63, 64, 66, 68; Cha69; Tyr70; Oic74; | |
| [hArg][Cha]YHKG[Oic][Nle]P[4-Cl— | Nle75; 4-Cl—F77]Apelin-17(62-77) | |
| F]{COOH} | | |
| {MeS- | 3-(methylthio)propionyl- | 385 |
| Propionyl}F[hArg][hArg]Q[hArg]P | [hArg63, 64, 66, 68; Cha69; Trp70; Oic74; | |
| [hArg][Cha]WHKG[Oic][Nle]P[4-Cl— | Nle75; 4-Cl—F77]Apelin-17(62-77) | |
| F]{COOH} | | |
| {MeS- | 3-(methylthio)propionyl- | 386 |
| Propionyl}F[hArg][hArg]Q[hArg]P | [hArg63, 64, 66, 68; Cha69; Phe70; Oic74; | |
| [hArg][Cha]FHKG[Oic][Nle]P[4-Cl— | Nle75; 4-Cl—F77]Apelin-17(62-77) | |
| F]{COOH} | | |
| {MeS- | 3-(methylthio)propionyl- | 387 |
| Propionyl}F[hArg][hArg]Q[hArg]P | [hArg63, 64, 66, 68; Cha69; NMePhe70; | |
| [hArg][Cha][NMePhe]HKG[Oic][Nle]P[4- | Oic74; Nle75; 4-Cl—F77]Apelin-17(62-77) | |
| Cl—F]{COOH} | | |
| {MeS- | 3-(methylthio)propionyl- | 388 |
| Propionyl}F[hArg][hArg]Q[hArg]P | [hArg63, 64, 66, 68; Cha69; 1- | |
| [hArg][Cha][1-Nal]HKG[Oic][Nle]P[4-Cl— | Nal70; Oic74; Nle75; 4-Cl—F77]Apelin- | |
| F]{COOH} | 17(62-77) | |
| {MeS- | 3-(methylthio)propionyl- | 389 |
| Propionyl}F[hArg][hArg]Q[hArg]P | [hArg63, 64, 66, 68; Cha69; 2- | |
| [hArg][Cha][2-Nal]HKG[Oic][Nle]P[4-Cl— | Nal70; Oic74; Nle75; 4-Cl—F77]Apelin- | |
| F]{COOH} | 17(62-77) | |
| {MeS- | 3-(methylthio)propionyl- | 390 |
| Propionyl}F[hArg][hArg]Q[hArg]P | [hArg63, 64, 66, 68; Cha69; Bip70; Oic74; | |
| [hArg][Cha][Bip]HKG[Oic][Nle]P[4-Cl— | Nle75; 4-Cl—F77]Apelin-17(62-77) | |
| F]{COOH} | | |
| {MeS- | 3-(methylthio)propionyl- | 391 |
| Propionyl}F[hArg][hArg]Q[hArg]P | [hAg63, 64, 66, 68; Cha69; Igl70; Oic74; | |
| [hArg][Cha][Igl]HKG[Oic][Nle]P[4-Cl— | Nle75; 4-Cl—F77]Apelin-17(62-77) | |
| F]{COOH} | | |
| {MeS- | 3-(methylthio)propionyl- | 392 |
| Propionyl}F[hArg][hArg]Q[hArg]P | [hArg63, 64, 66, 68; Cha69; 4-Cl— | |
| [hArg][Cha][4-Cl—F]HKG[Oic][Nle]P[4- | F70, 77; Oic74; Nle75]Apelin-17(62-77) | |
| Cl—F]{COOH} | | |
| {MeS- | 3-(methylthio)propionyl- | 393 |
| Propionyl}F[hArg][hArg]Q[hArg]P | [hArg63, 64, 66, 68; Cha69; 4-F— | |
| [hArg][Cha][4-F—F]HKG[Oic][Nle]P[4-Cl— | F70; Oic74; Nle75; 4-Cl—F77]Apelin- | |
| F]{COOH} | 17(62-77) | |
| {MeS- | 3-(methylthio)propionyl- | 394 |
| Propionyl}F[hArg][hArg]Q[hArg]P | [hArg63, 64, 66, 68; Cha69; pI- | |
| [hArg][Cha][pI-Phe]HKG[Oic][Nle]P[4- | Phe70; Oic74; Nle75; 4-Cl—F77]Apelin- | |
| Cl—F]{COOH} | 17(62-77) | |
| {MeS- | 3-(methylthio)propionyl- | 395 |
| Propionyl}F[hArg][hArg]Q[hArg]P | [hArg63, 64, 66, 68; Cha69; 2Pal70; Oic74; | |
| [hArg][Cha][2Pal]HKG[Oic][Nle]P[4-Cl— | Nle75; 4-Cl—F77]Apelin-17(62-77) | |
| F]{COOH} | | |
| {MeS- | 3-(methylthio)propionyl- | 396 |
| Propionyl}F[hArg][hArg]Q[hArg]P | [hArg63, 64, 66, 68; Cha69; 3Pal70; Oic74; | |
| [hArg][Cha][3Pal]HKG[Oic][Nle]P[4-Cl— | Nle75; 4-Cl—F77]Apelin-17(62-77) | |
| F]{COOH} | | |
| {MeS- | 3-(methylthio)propionyl- | 397 |
| Propionyl}F[hArg][hArg]Q[hArg]P | [hArg63, 64, 66, 68; Cha69; Tic70; Oic74; | |
| [hArg][Cha][Tic]HKG[Oic][Nle]P[4-Cl— | Nle75; 4-Cl—F77]Apelin-17(62-77) | |
| F]{COOH} | | |
| {MeS- | 3-(methylthio)propionyl- | 398 |
| Propionyl}F[hArg][hArg]Q[hArg]P | [hArg63, 64, 66, 68; Cha69; Orn70; Oic74; | |
| [hArg][Cha][Orn]HKG[Oic][Nle]P[4-Cl— | Nle75; 4-Cl—F77]Apelin-17(62-77) | |
| F]{COOH} | | |
| {MeS- | 3-(methylthio)propionyl- | 399 |
| Propionyl}F[hArg][hArg]Q[hArg]P | [hArg63, 64, 66, 68; Cha69; Dab70; Oic74; | |
| [hArg][Cha][Dab]HKG[Oic][Nle]P[4-Cl— | Nle75; 4-Cl—F77]Apelin-17(62-77) | |
| F]{COOH} | | |
| {MeS- | 3-(methylthio)propionyl- | 400 |
| Propionyl}F[hArg][hArg]Q[hArg]P | [hArg63, 64, 66, 68; Cha69; Dap70; Oic74; | |
| [hArg][Cha][Dap]HKG[Oic][Nle]P[4-Cl— | Nle75; 4-Cl—F77]Apelin-17(62-77) | |
| F]{COOH} | | |
| {MeS- | 3-(methylthio)propionyl- | 401 |
| Propionyl}F[hArg][hArg]Q[hArg]P | [hArg63, 64, 66, 68; Cha69; Thr71; Oic74; | |
| [hArg][Cha]STKG[Oic][Nle]P[4-Cl— | Nle75; 4-Cl—F77]Apelin-17(62-77) | |
| F]{COOH} | | |
| {MeS- | 3-(methylthio)propionyl- | 402 |
| Propionyl}F[hArg][hArg]Q[hArg]P | [hArg63, 64, 66, 68; Cha69; Ala71; Oic74; | |
| [hArg][Cha]SAKG[Oic][Nle]P[4-Cl— | Nle75; 4-Cl—F77]Apelin-17(62-77) | |
| F]{COOH} | | |
| {MeS- | 3-(methylthio)propionyl- | 403 |
| Propionyl}F[hArg][hArg]Q[hArg]P | [hArg63, 64, 66, 68; Cha69; Abu71; Oic74; | |
| [hArg][Cha]S[Abu]KG[Oic][Nle]P[4-Cl— | Nle75; 4-Cl—F77]Apelin-17(62-77) | |
| F]{COOH} | | |
| {MeS- | 3-(methylthio)propionyl- | 404 |
| Propionyl}F[hArg][hArg]Q[hArg]P | [hArg63, 64, 66, 68; Cha69; Nle71, 75; | |
| [hArg][Cha]S[Nle]KG[Oic][Nle]P[4-Cl— | Oic74; 4-Cl—F77]Apelin-17(62-77) | |
| F]{COOH} | | |
| {MeS- | 3-(methylthio)propionyl- | 405 |
| Propionyl}F[hArg][hArg]Q[hArg]P | [hArg63, 64, 66, 68; Cha69; Nva71; Oic74; | |
| [hArg][Cha]S[Nva]KG[Oic][Nle]P[4-Cl— | Nle75; 4-Cl—F77]Apelin-17(62-77) | |
| F]{COOH} | | |
| {MeS- | 3-(methylthio)propionyl- | 406 |
| Propionyl}F[hArg][hArg]Q[hArg]P | [hArg63, 64, 66, 68; Cha69; Val71; Oic74; | |
| [hArg][Cha]SVKG[Oic][Nle]P[4-Cl— | Nle75; 4-Cl—F77]Apelin-17(62-77) | |
| F]{COOH} | | |
| {MeS- | 3-(methylthio)propionyl- | 407 |
| Propionyl}F[hArg][hArg]Q[hArg]P | [hArg63, 64, 66, 68; Cha69; Gly71; Oic74; | |
| [hArg][Cha]SGKG[Oic][Nle]P[4-Cl— | Nle75; 4-Cl—F77]Apelin-17(62-77) | |
| F]{COOH} | | |
| {MeS- | 3-(methylthio)propionyl- | 408 |
| Propionyl}F[hArg][hArg]Q[hArg]P | [hArg63, 64, 66, 68; Cha69; Leu71; Oic74; | |
| [hArg][Cha]SLKG[Oic][Nle]P[4-Cl— | Nle75; 4-Cl—F77]Apelin-17(62-77) | |
| F]{COOH} | | |
| {MeS- | 3-(methylthio)propionyl- | 409 |
| Propionyl}F[hArg][hArg]Q[hArg]P | [hArg63, 64, 66, 68; Cha69; Ile71; Oic74; | |
| [hArg][Cha]SIKG[Oic][Nle]P[4-Cl— | Nle75; 4-Cl—F77]Apelin-17(62-77) | |
| F]{COOH} | | |
| {MeS- | 3-(methylthio)propionyl- | 410 |
| Propionyl}F[hArg][hArg]Q[hArg]P | [hArg63, 64, 66, 68; Cha69; CPG71; Oic74; | |
| [hArg][Cha]S[CPG]KG[Oic][Nle]P[4-Cl— | Nle75; 4-Cl—F77]Apelin-17(62-77) | |
| F]{COOH} | | |
| {MeS- | 3-(methylthio)propionyl- | 411 |
| Propionyl}F[hArg][hArg]Q[hArg]P | [hArg63, 64, 66, 68; Cha69; Chg71; Oic74; | |
| [hArg][Cha]S[Chg]KG[Oic][Nle]P[4-Cl— | Nle75; 4-Cl—F77]Apelin-17(62-77) | |
| F]{COOH} | | |
| {MeS- | 3-(methylthio)propionyl- | 412 |
| Propionyl}F[hArg][hArg]Q[hArg]P | [hArg63, 64, 66, 68; Cha69, 71; Oic74; | |
| [hArg][Cha]S[Cha]KG[Oic][Nle]P[4-Cl— | Nle75; 4-Cl—F77]Apelin-17(62-77) | |
| F]{COOH} | | |
| {MeS- | 3-(methylthio)propionyl- | 413 |
| Propionyl}F[hArg][hArg]Q[hArg]P | [hArg63, 64, 66, 68; Cha69; Oic74; Nle75; | |
| [hArg][Cha]SHKG[Oic][Nle]P[4-Cl— | 4-Cl—F77]Apelin-17(62-77) | |
| F]{COOH} | | |
| {MeS- | 3-(methylthio)propionyl- | 414 |
| Propionyl}F[hArg][hArg]Q[hArg]P | [hArg63, 64, 66, 68; Cha69; Tyr71; Oic74; | |
| [hArg][Cha]SYKG[Oic][Nle]P[4-Cl— | Nle75; 4-Cl—F77]Apelin-17(62-77) | |
| F]{COOH} | | |
| {MeS- | 3-(methylthio)propionyl- | 415 |
| Propionyl}F[hArg][hArg]Q[hArg]P | [hArg63, 64, 66, 68; Cha69; Trp71; Oic74; | |
| [hArg][Cha]SWKG[Oic][Nle]P[4-Cl— | Nle75; 4-Cl—F77]Apelin-17(62-77) | |
| F]{COOH} | | |
| {MeS- | 3-(methylthio)propionyl- | 416 |
| Propionyl}F[hArg][hArg]Q[hArg]P | [hArg63, 64, 66, 68; Cha69; Phe71; Oic74; | |
| [hArg][Cha]SFKG[Oic][Nle]P[4-Cl— | Nle75; 4-Cl—F77]Apelin-17(62-77) | |
| F]{COOH} | | |
| {MeS- | 3-(methylthio)propionyl- | 417 |
| Propionyl}F[hArg][hArg]Q[hArg]P | [hArg63, 64, 66, 68; Cha69; NMePhe71; | |
| [hArg][Cha]S[NMePhe]KG[Oic][Nle]P[4- | Oic74; Nle75; 4-Cl—F77]Apelin-17(62-77) | |
| Cl—F]{COOH} | | |
| {MeS- | 3-(methylthio)propionyl- | 418 |
| Propionyl}F[hArg][hArg]Q[hArg]P | [hArg63, 64, 66, 68; Cha69; 1- | |
| [hArg][Cha]S[1-Nal]KG[Oic][Nle]P[4-Cl— | Nal71; Oic74; Nle75; 4-Cl—F77]Apelin- | |
| F]{COOH} | 17(62-77) | |
| {MeS- | 3-(methylthio)propionyl- | 419 |
| Propionyl}F[hArg][hArg]Q[hArg]P | [hArg63, 64, 66, 68; Cha69; 2- | |
| [hArg][Cha]S[2-Nal]KG[Oic][Nle]P[4-Cl— | Nal71; Oic74; Nle75; 4-Cl—F77]Apelin- | |
| F]{COOH} | 17(62-77) | |
| {MeS- | 3-(methylthio)propionyl- | 420 |
| Propionyl}F[hArg][hArg]Q[hArg]P | [hArg63, 64, 66, 68; Cha69; Bip71; Oic74; | |
| [hArg][Cha]S[Bip]KG[Oic][Nle]P[4-Cl— | Nle75; 4-Cl—F77]Apelin-17(62-77) | |
| F]{COOH} | | |
| {MeS- | 3-(methylthio)propionyl- | 421 |
| Propionyl}F[hArg][hArg]Q[hArg]P | [hArg63, 64, 66, 68; Cha69; Igl71; Oic74; | |
| [hArg][Cha]S[Igl]KG[Oic][Nle]P[4-Cl— | Nle75; 4-Cl—F77]Apelin-17(62-77) | |
| F]{COOH} | | |
| {MeS- | 3-(methylthio)propionyl- | 422 |
| Propionyl}F[hArg][hArg]Q[hArg]P | [hArg63, 64, 66, 68; Cha69; 4-Cl— | |
| [hArg][Cha]S[4-Cl—F]KG[Oic][Nle]P[4-Cl— | F71, 77; Oic74; Nle75]Apelin-17(62-77) | |
| F]{COOH} | | |
| {MeS- | 3-(methylthio)propionyl- | 423 |
| Propionyl}F[hArg][hArg]Q[hArg]P | [hArg63, 64, 66, 68; Cha69; 4-F— | |
| [hArg][Cha]S[4-F—F]KG[Oic][Nle]P[4-Cl— | F71; Oic74; Nle75; 4-Cl—F77]Apelin- | |
| F]{COOH} | 17(62-77) | |
| {MeS- | 3-(methylthio)propionyl- | 424 |
| Propionyl}F[hArg][hArg]Q[hArg]P | [hArg63, 64, 66, 68; Cha69; 4-I— | |
| [hArg][Cha]S[4-I—F]KG[Oic][Nle]P[4-Cl— | F71; Oic74; Nle75; 4-Cl—F77]Apelin- | |
| F]{COOH} | 17(62-77) | |
| {MeS- | 3-(methylthio)propionyl- | 425 |
| Propionyl}F[hArg][hArg]Q[hArg]P | [hArg63, 64, 66, 68; Cha69; 2Pal71; Oic74; | |
| [hArg][Cha]S[2Pal]KG[Oic][Nle]P[4-Cl— | Nle75; 4-Cl—F77]Apelin-17(62-77) | |
| F]{COOH} | | |
| {MeS- | 3-(methylthio)propionyl- | 426 |
| Propionyl}F[hArg][hArg]Q[hArg]P | [hArg63, 64, 66, 68; Cha69; 3Pal71; Oic74; | |
| [hArg][Cha]S[3Pal]KG[Oic][Nle]P[4-Cl— | Nle75; 4-Cl—F77]Apelin-17(62-77) | |
| F]{COOH} | | |
| {MeS- | 3-(methylthio)propionyl- | 427 |
| Propionyl}F[hArg][hArg]Q[hArg]P | [hArg63, 64, 66, 68; Cha69; Tic71; Oic74; | |
| [hArg][Cha]S[Tic]KG[Oic][Nle]P[4-Cl— | Nle75; 4-Cl—F77]Apelin-17(62-77) | |
| F]{COOH} | | |
| {MeS- | 3-(methylthio)propionyl- | 428 |
| Propionyl}F[hArg][hArg]Q[hArg]P | [hArg63, 64, 66, 68; Cha69; Orn71; Oic74; | |
| [hArg][Cha]S[Orn]KG[Oic][Nle]P[4-Cl— | Nle75; 4-Cl—F77]Apelin-17(62-77) | |
| F]{COOH} | | |
| {MeS- | 3-(methylthio)propionyl- | 429 |
| Propionyl}F[hArg][hArg]Q[hArg]P | [hArg63, 64, 66, 68; Cha69; Dab71; Oic74; | |
| [hArg][Cha]S[Dab]KG[Oic][Nle]P[4-Cl— | Nle75; 4-Cl—F77]Apelin-17(62-77) | |
| F]{COOH} | | |
| {MeS- | 3-(methylthio)propionyl- | 430 |
| Propionyl}F[hArg][hArg]Q[hArg]P | [hArg63, 64, 66, 68; Cha69; Dap71; Oic74; | |
| [hArg][Cha]S[Dap]KG[Oic][Nle]P[4-Cl— | Nle75; 4-Cl—F77]Apelin-17(62-77) | |
| F]{COOH} | | |

[0376] Additional numbered embodiments are shown below:

[0377] 66. The polypeptide of Embodiment 62, wherein X₋₄ or X₋₃ or X₋₂ or X₋₁ or X₁ or X₂ or X₉ is replaced with Z.

[0378] 67. The polypeptide of Embodiment 62, wherein Z, or any X comprises a PEG derivative or serum half-life prolonging group covalently attached via a linker or the derivative may be attached with no linker

[0379] 68. An APJ agonist having an amino acid sequence selected from the group of sequences consisting of: SEQ ID NOs: 431-507. The following table shows examples of Embodiments 66-68. In the table, the free acid can be a carboxylic acid and the amide can be at the C-terminus and the agonist can include a PEG derivative or serum half-life prolonging group.

TABLE 7

| | | SEQ |
|---|---|---|
| AMINO ACID SEQUENCE | DESIGNATION | ID NO. |
| {Acetyl}[Atz(PEG10)]GGLRP[hArg][NMeLeu] | Ac-Atz(PEG10)-Gly-Gly- | 431 |
| SHKGP[Nle]P[4-Cl—F]{FreeAcid} | [Leu65; hArg68; NMeLeu69; Nle75; 4- | |
| | Cl—F77]Apelin-13(65-77) | |
| {Acetyl}[Atz(PEG10)]GLRP[hArg][NMeLeu] | Ac-Atz(PEG10)-Gly- | 432 |
| SHKGP[Nle]P[4-Cl—F]{FreeAcid} | [Leu65; hArg68; NMeLeu69; Nle75; 4- | |
| | Cl—F77]Apelin-13(65-77) | |
| {Acetyl}[Atz(PEG10)]LRP[hArg][NMeLeu] | Ac-Atz(PEG10)- | 433 |
| SHKGP[Nle]P[4-Cl—F]{FreeAcid} | [Leu65; hArg68; NMeLeu69; Nle75; 4- | |
| | Cl—F77]Apelin-13(65-77) | |
| {Hydrogen}[PE][Atz(PEG10)]P[hArg][NMeLeu] | [PE65; Atz(PEG10)66; hArg68; NMeLeu69; | 434 |
| SHKGP[Nle]P[4-Cl—F]{FreeAcid} | Nle75; 4-Cl—F77]Apelin- | |
| | 13(65-77) | |
| {Hydrogen}[PE]RP[Atz(PEG10)][NMeLeu] | [PE65; Atz(PEG10)68; NMeLeu69; | 435 |
| SHKGP[Nle]P[4-Cl—F]{FreeAcid} | Nle75; 4-Cl—F77]Apelin-13(65-77) | |
| (Hydrogen}[PE]RP[hArg][Atz(PEG10)] | [PE65; hArg68; Atz(PEG10)69 ; Nle75; | 436 |
| SHKGP[Nle]P[4-Cl—F]{FreeAcid} | 4-Cl—F77]Apelin-13(65-77) | |
| {Hydrogen}[PE]RP[hArg][NMeLeu][Atz(PEG10)] | [PE65; hArg68; NMeLeu69; Atz(PEG10)70; | 437 |
| HKGP[Nle]P[4-Cl—F]{FreeAcid} | Nle75; 4-Cl—F77]Apelin-13(65-77) | |
| {Hydrogen}[PE]RP[hArg][NMeLeu]S[Atz(PEG10)] | [PE65; hArg68; NMeLeu69; Atz(PEG10)71; | 438 |
| KGP[Nle]P[4-Cl—F]{FreeAcid} | Nle75; 4-Cl—F77]Apelin-13(65-77) | |
| {Hydrogen}[PE]RP[hArg][NMeLeu]SHKGP | [PE65; hArg68; NMeLeu69; Atz(PEG10)75; | 439 |
| [Atz(PEG10)]P[4-Cl—F]{FreeAcid} | 4-Cl—F77]Apelin-13(65-77) | |
| {Hydrogen}[PE]RP[hArg][NMeLeu]SHKGP[Nle] | [PE65; hArg68; NMeLeu69; Nle75; | 440 |
| P[Atz(PEG10)]{Amide} | Atz(PEG10)77]Apelin-13(65-77)- | |
| | amide | |
| {Hydrogen}[PE]RP[hArg][NMeLeu]SHKGP[Nle] | [PE65; hArg68; NMeLeu69; Nle75; | 441 |
| P[4-Cl—F][Atz(PEG10)]{Amide} | 4-Cl—F77]Apelin-13(65-77)- | |
| | Atz(PEG10)-amide | |
| {Hydrogen}[PE]RP[hArg][NMeLeu]SHKGP[Nle] | [PE65; hArg68; NMeLeu69; Nle75; | 442 |
| P[4-Cl—F]G[Atz(PEG10)]{Amide} | 4-Cl—F77]Apelin-13(65-77)-Gly- | |
| | Atz(PEG10)-amide | |
| {Hydrogen}[PE]RP[hArg][NMeLeu]SHKGP[Nle] | [PE65; hArg68; NMeLeu69; Nle75; | 443 |
| P[4-Cl—F]GG[Atz(PEG10)]{Amide} | 4-Cl—F77]Apelin-13(65-77)-Gly-Gly- | |
| | Atz(PEG10)-amide | |
| {Acetyl}[Atz(PEG10)]LRP[hArg][NMeLeu] | Ac-Atz(PEG10)- | 444 |
| [Atz(PEG10)]HKGP[Nle]P[4-Cl—F]{FreeAcid} | [Leu65; hArg68; NMeLeu69; Atz(PEG10)70; | |
| | Nle75; 4-Cl—F77]Apelin-13(65-77) | |
| {Hydrogen}[PE]RP[hArg][Cha][Atz(PEG10)] | [PE65; hArg68; Cha69; Atz(PEG10)70; | 445 |
| HKGP[Nle]P[4-Cl—F]{FreeAcid} | Nle75; 4-Cl—F77]Apelin-13(65-77) | |
| {Hydrogen}[PE]RP[hArg][Cha][Atz(PEG10)] | [PE65; hArg68; Cha69; Atz(PEG10)70; | 446 |
| HKG[Oic][Nle]P[4-Cl—F]{FreeAcid} | Oic74; Nle75; 4-Cl—F77]Apelin-13(65-77) | |
| {Hydrogen}[PE]RP[hArg][Cha][Atz(PEG10)] | [PE65; hArg68; Cha69; Atz(PEG10)70; | 447 |
| HKG[Oic][Nle]P[4-Cl—F]{Amide} | Oic74; Nle75; 4-Cl—F77]Apelin- | |
| | 13(65-77)-amide | |
| {Hydrogen}[PE]RP[hArg][NMeLeu][Atz(PEG10)] | [PE65; hArg68; NMeLeu69; Atz(PEG10)70; | 448 |
| HKGP[Nle]P[4-Cl—F]{FreeAcid} | Nle75; 4-Cl—F77]Apelin-13(65-77) | |
| {Hydrogen}[PE]RP[hArg][NMeLeu][Atz(PEG10)] | [PE65; hArg68; NMeLeu69; Atz(PEG10)70; | 449 |
| HKG[Oic][Nle]P[4-Cl—F]{FreeAcid} | Oic74; Nle75; | |
| | 4-Cl—F77]Apelin-13(65-77) | |
| {Hydrogen}[PE]RP[hArg][NMeLeu][Atz(PEG10)] | [PE65; hArg68; NMeLeu69; Atz(PEG10)70; | 450 |
| HKG[Oic][Nle]P[4-Cl—F]{Amide} | Oic74; Nle75; | |
| | 4-Cl—F77]Apelin-13(65-77)-amide | |
| {Hydrogen}[PE]RP[hArg][Cha][Atz(1K- | [PE65; hArg68; Cha69; Atz(1K- | 451 |
| mPEG)]HKG[Oic][Nle]P[4-Cl—F]{FreeAcid} | mPEG)70; Oic74; Nle75; | |
| | 4-Cl—F77]Apelin-13(65-77) | |
| {Hydrogen}[PE]RP[hArg][Cha][Atz(2K- | [PE65; hArg68; Cha69; Atz(2K- | 452 |
| mPEG)]HKG[Oic][Nle]P[4-Cl—F]{FreeAcid} | mPEG)70; Oic74; Nle75; | |
| | 4-Cl—F77]Apelin-13(65-77) | |
| {Hydrogen}[PE]RP[hArg][Cha][Atz(5K- | [PE65; hArg68; Cha69; Atz(5K- | 453 |
| mPEG)]HKG[Oic][Nle]P[4-Cl—F]{FreeAcid} | mPEG)70; Oic74; Nle75; | |
| | 4-Cl—F77]Apelin-13(65-77) | |
| {Hydrogen}[PE]RP[hArg][Cha][Atz(10K- | [PE65; hArg68; Cha69; Atz(10K- | 454 |
| mPEG)]HKG[Oic][Nle]P[4-Cl—F]{FreeAcid} | mPEG); Oic74; Nle75; | |
| | 4-Cl—F77]Apelin-13(65-77) | |
| {Hydrogen}[PE]RP[hArg][Cha][Atz(20K- | [PE65; hArg68; Cha69; Atz(20K- | 456 |
| mPEG)]HKG[Oic][Nle]P[4-Cl—F]{FreeAcid} | mPEG)70; Oic74; Nle75; | |
| | 4-Cl—F77]Apelin-13(65-77) | |
| {Hydrogen}[PE]RP[hArg][NMeLeu][Atz(20K- | [PE65; hArg68; NMeLeu69; [Atz(20K- | 457 |
| mPEG)]HKG[Oic][Nle]P[4-Cl—F]{FreeAcid} | mPEG)]70; Oic74; Nle75; | |
| | 4-Cl—F77]Apelin-13(65-77) | |
| {Hydrogen}[PE]RP[hArg][Cha]S[Atz(1K- | [PE65; hArg68; Cha69; Atz(1K- | 458 |
| mPEG)]KG[Oic][Nle]P[4-Cl—F]{FreeAcid} | mPEG)71; Oic74; Nle75; | |
| | 4-Cl—F77]Apelin-13(65-77) | |
| {Hydrogen}[PE]RP[hArg][Cha]S[Atz(2K- | [PE65; hArg68; Cha69; Atz(2K- | 459 |
| mPEG)]KG[Oic][Nle]P[4-Cl—F]{FreeAcid} | mPEG)K71; Oic74; Nle75; | |
| | 4-Cl—F77]Apelin-13(65-77) | |
| {Hydrogen}[PE]RP[hArg][Cha]S[Atz(5K- | [PE65; hArg68; Cha69; Atz(5K- | 460 |
| mPEG)]KG[Oic][Nle]P[4-Cl—F]{FreeAcid} | mPEG)71; Oic74; Nle75; | |
| | 4-Cl—F77]Apelin-13(65-77) | |
| {Hydrogen}[PE]RP[hArg][Cha]S[Atz(10K- | [PE65; hArg68; Cha69; Atz(10K- | 461 |
| mPEG)]KG[Oic][Nle]P[4-Cl—F]{FreeAcid} | mPEG); Oic74; Nle75; | |
| | 4-Cl—F77]Apelin-13(65-77) | |
| {Hydrogen}[PE]RP[hArg][Cha]S[Atz(20K- | [PE65; hArg68; Cha69; Atz(20K- | 462 |
| mPEG)]KG[Oic][Nle]P[4-Cl—F]{FreeAcid} | mPEG)71; Oic74; Nle75; | |
| | 4-Cl—F77]Apelin-13(65-77) | |
| {Acetyl}[Atz(20K- | Ac-[Atz(20K-mPEG)]- | 463 |
| mPEG)]LRP[hArg][NMeLeu][Atz(20K- | [Leu65; hArg68; NMeLeu69; [Atz(20K- | |
| mPEG)]HKGP[Nle]P[4-Cl—F]{FreeACid} | mPEG)]70; Nle75; | |
| | 4-Cl—F77]Apelin-13(65-77) | |
| (Hydrogen}[PE]RP[hArg][NMeLeu]SHKGP | PE65; hArg68; NMeLeu69; Nle75; D- | 464 |
| [Nle]P[D-Bip]K(Ac-Atz(20K-mPEG)) | Bip77; K(Ac-Atz(20K- | |
| | mPEG))78]Apelin-13(65-78)-amide | |
| {Acetyl}[Atz(1K- | Ac-Atz(1K-mPEG)- | 465 |
| mPEG)]LRP[hArg][Cha]SHKG[Oic][Nle]P[4- | [Leu65; hArg68; Cha69; Oic74; Nle75; | |
| Cl—F]{FreeAcid} | 4-Cl—F77]Apelin-13(65-77) | |
| {Acetyl}[Atz(2K- | Ac-Atz(2K-mPEG)- | 466 |
| mPEG)]LRP[hArg][Cha]SHKG[Oic][Nle]P[4- | [Leu65; hArg68; Cha69; Oic74; Nle75; | |
| Cl—F]{FreeAcid} | 4-Cl—F77]Apelin-13(65-77) | |
| {Acetyl}[Atz(5K- | Ac-Atz(5K-mPEG)- | 467 |
| mPEG)]LRP[hArg][Cha]SHKG[Oic][Nle]P[4- | [Leu65; hArg68; Cha69; Oic74; Nle75; | |
| Cl—F]{FreeAcid} | 4-Cl—F77]Apelin-13(65-77) | |
| {Acetyl}[Atz(10K- | Ac-Atz(10K-mPEG)- | 468 |
| mPEG)]LRP[hArg][Cha]SHKG[Oic][Nle]P[4- | [Leu65; hArg68; Cha69; Oic74; Nle75; | |
| Cl—F]{FreeAcid} | 4-Cl—F77]Apelin-13(65-77) | |
| {Acetyl}[Atz(20K- | Ac-Atz(20K-mPEG)- | 469 |
| mPEG)]LRP[hArg][Cha]SHKG[Oic][Nle]P[4- | [Leu65; hArg68; Cha69; Oic74; Nle75; | |
| Cl—F]{FreeAcid} | 4-Cl—F77]Apelin-13(65-77) | |
| {Hydrogen}[Atz(20K- | Atz(20K-mPEG)- | 470 |
| mPEG)]KFRRQRP[hArg][Cha]SHKG[Oic][Nle] | [hArg68; Cha69; Oic74; Nle75; | |
| P[4-Cl—F]{FreeAcid} | 4-Cl—F77]Apelin-17(61-77) | |
| {Hydrogen}[Atz(20K- | Atz(20K-mPEG)- | 471 |
| mPEG)]LRP[hArg][Cha]SHKG[Oic][Nle]P[4- | [Leu65; hArg68; Cha69; Oic74; Nle75; | |
| Cl—F]{FreeAcid} | 4-Cl—F77]Apelin-13(65-77) | |
| {Thiopropionyl(20K- | Thiopropionyl(20K-mPEG)- | 472 |
| mPEG)}LRP[hArg][Cha]SHKG[Oic][Nle]P[4- | [Leu65; hArg68; Cha69; Oic74; Nle75; | |
| Cl—F]{FreeAcid} | 4-Cl—F77]Apelin-13(65-77) | |
| {Thiopropionyl(20K- | Thiopropionyl(20K-mPEG)- | 473 |
| mPEG)}KFRRQRP[hArg][Cha]SHKG[Oic][Nle] | [hArg68; Cha69; Oic74; Nle75; | |
| P[4-Cl—F]{FreeAcid} | 4-Cl—F77]Apelin-17(61-77) | |
| {Thiopropionyl(40K- | Thiopropionyl(40K-mPEG)- | 474 |
| mPEG)}KFRRQRP[hArg][Cha]SHKG[Oic][Nle] | [hArg68; Cha69; Oic74; Nle75; | |
| P[4-Cl—F]{FreeAcid} | 4-Cl—F77]Apelin-17(61-77) | |
| {Thiopropionyl(20K- | Thiopropionyl(20K-mPEG)-Leu- | 475 |
| mPEG)}LLRP[hArg][Cha]SHKG[Oic][Nle]P | [Leu65; hArg68; Cha69; Oic74; Nle75; | |
| [4-Cl—F]{FreeAcid} | 4-Cl—F77]Apelin-13(65-77) | |
| {Thiopropionyl(20K- | Thiopropionyl(20K-mPEG)- | 476 |
| mPEG)}FRRQRP[hArg][Cha]SHKG[Oic][Nle] | [hArg68; Cha69; Oic74; Nle75; | |
| P[4-Cl—F]{COOH} | 4-Cl—F77]Apelin-17(62-77) | |
| {Thiopropionyl(20K- | Thiopropionyl(20K-mPEG)- | 477 |
| mPEG)}RRQRP[hArg][Cha]SHKG[Oic][Nle] | [hArg68; Cha69; Oic74; Nle75; | |
| P[4-Cl—F]{COOH} | 4-Cl—F77]Apelin-17(63 -77) | |
| {Thiopropionyl(20K- | Thiopropionyl(20K-mPEG)- | 478 |
| mPEG)}RQRP[hArg][Cha]SHKG[Oic][Nle]P | [hArg68; Cha69; Oic74; Nle75; | |
| [4-Cl—F]{COOH} | 4-Cl—F77]Apelin-17(64-77) | |
| {Thiopropionyl(20K- | Thiopropionyl(20K-mPEG)- | 479 |
| mPEG)}QRP[hArg][Cha]SHKG[Oic][Nle]P[4- | [hArg68; Cha69; Oic74; Nle75; | |
| Cl—F]{COOH} | 4-Cl—F77]Apelin-17(65-77) | |
| (Thiopropionyl(1K- | Thiopropionyl(1K-mPEG)- | 480 |
| mPEG)}QRP[hArg][Cha]SHKG[Oic][Nle]P[4- | [hArg68; Cha69; Oic74; Nle75; | |
| Cl—F]{FreeAcid} | 4-Cl—F77]Apelin-17(65-77) | |
| (Thiopropionyl(2K- | Thiopropionyl(2K-mPEG)- | 483 |
| mPEG)}QRP[hArg][Cha]SHKG[Oic][Nle]P[4- | [hArg68; Cha69; Oic74; Nle75; | |
| Cl—F]{FreeAcid} | 4-Cl—F77]Apelin-17(65-77) | |
| {Thiopropionyl(5K- | Thiopropionyl(5K-mPEG)- | 481 |
| mPEG)}QRP[hArg][Cha]SHKG[Oic][Nle]P[4- | [hArg68; Cha69; Oic74; Nle75; | |
| Cl—F]{FreeAcid} | 4-Cl—F77]Apelin-17(65-77) | |
| {Thiopropionyl(10K- | Thiopropionyl(10K-mPEG)- | 482 |
| mPEG)}QRP[hArg][Cha]SHKG[Oic][Nle]P[4- | [hArg68; Cha69; Oic74; Nle75; | |
| Cl—F]{FreeAcid} | 4-Cl—F77]Apelin-17(65-77) | |
| {Thiopropionyl(40K- | Thiopropionyl(40K-mPEG)- | 484 |
| mPEG)}QRP[hArg][Cha]SHKG[Oic][Nle]P[4- | [hArg68; Cha69; Oic74; Nle75; | |
| Cl—F]{FreeAcid} | 4-Cl—F77]Apelin-17(65-77) | |
| {Thiopropionyl(1K- | Thiopropionyl(1K-mPEG)- | 485 |
| mPEG)}KFRRQRP[hArg][Cha]SHKG[Oic][Nle] | [hArg68; Cha69; Oic74; Nle75; | |
| P[4-Cl—F]{FreeAcid} | 4-Cl—F77]Apelin-17(61-77) | |
| {Thiopropionyl(2K- | Thiopropionyl(2K-mPEG)- | 486 |
| mPEG)}KFRRQRP[hArg][Cha]SHKG[Oic][Nle] | [hArg68; Cha69; Oic74; Nle75; | |
| P[4-Cl—F]{FreeAcid} | 4-Cl—F77]Apelin-17(61-77) | |
| {Thiopropionyl(5K- | Thiopropionyl(5K-mPEG)- | 487 |
| mPEG)}KFRRQRP[hArg][Cha]SHKG[Oic][Nle] | [hArg68; Cha69; Oic74; Nle75; | |
| P[4-Cl—F]{FreeAcid} | 4-Cl—F77]Apelin-17(61-77) | |
| {Thiopropionyl(10K- | Thiopropionyl(10K-mPEG)- | 488 |
| mPEG)}KFRRQRP[hArg][Cha]SHKG[Oic][Nle] | [hArg68; Cha69; Oic74; Nle75; | |
| P[4-Cl—F]{FreeAcid} | 4-Cl—F77]Apelin-17(61-77) | |
| {Thiopropionyl(40K- | Thiopropionyl(40K-mPEG)- | 489 |
| mPEG)}KFRRQRP[hArg][Cha]SHKG[Oic][Nle] | [hArg68; Cha69; Oic74; Nle75; | |
| P[4-Cl—F]{FreeAcid} | 4-Cl—F77]Apelin-17(61-77) | |
| {Thiopropionyl(20K- | Thiopropionyl(20K-mPEG)- | 490 |
| mPEG)}F[hArg][hArg]Q[hArg]P[hArg][Cha] | [hArg63, 64, 66, 68; Cha69; Oic74; | |
| SHKG[Oic][Nle]P[4-Cl—F] | Nle75; 4-Cl—F77]Apelin-17(62-77) | |
| {Thiopropionyl(20K- | Thiopropionyl(20K-mPEG)- | 491 |
| mPEG)}OF[hArg][hArg]Q[hArg]P[hArg][Cha] | [Orn61; hArg63, 64, 66, 68; Cha69; Oic74; | |
| SHKG[Oic][Nle]P[4-Cl—F] | Nle75; 4-Cl—F77]Apelin-17(61-77) | |
| {Thiopropionyl(20K- | Thiopropionyl(20K-mPEG)- | 492 |
| mPEG)}OF[hArg][hArg]Q[Cit]P[hArg][Cha] | [Orn61; hArg63, 64, 68; Cit66; Cha69; | |
| SHKG[Oic][Nle]P[4-Cl—F] | Oic74; Nle75; 4-Cl—F77]Apelin- | |
| | 17(61-77) | |
| {Thiopropionyl(20K- | Thiopropionyl(20K-mPEG)- | 493 |
| mPEG)}F[hArg][hArg]Q[Cit]P[hArg][Cha] | [hArg63, 64, 68; Cit66; Cha69; | |
| SHKG[Oic][Nle]P[4-Cl—F] | Oic74; Nle75; 4-Cl—F77]Apelin- | |
| | 17(62-77) | |
| {Thiopropionyl(20K- | Thiopropionyl(20K-mPEG)- | 494 |
| mPEG)}F[Cit][Cit]Q[hArg]P[hArg][Cha] | [Cit63, 64; hArg66, 68; Cha69; | |
| SHKG[Oic][Nle]P[4-Cl—F] | Oic74; Nle75; 4-Cl—F77]Apelin- | |
| | 17(62-77) | |
| [NPeg11]KFRRQRP[hArg][Cha]SHKG[Oic] | NPeg11- | 495 |
| [Nle]P[4-Cl—F] | [hArg68; Cha69; Oic74; Nle75; | |
| | 4-Cl—F77]Apelin-17(61-77) | |
| [Atz(PEG10)]KFRRQRP[hArg][Cha]SHKG[Oic] | Atz(Peg10)- | 496 |
| [Nle]P[4-Cl—F] | [hArg68; Cha69; Oic74; Nle75; | |
| | 4-Cl—F77]Apelin-17(61-77) | |
| [Atz(PEG10)]KF[hArg][hArg]QRP[hArg][Cha] | Atz(Peg10)- | 497 |
| SHKG[Oic][Nle]P[4-Cl—F] | [hArg63, 64, 68; Cha69; Oic74; Nle75; | |
| | 4-Cl—F77]Apelin-17(61-77) | |
| [Atz(PEG10)]KF[hArg][hArg]Q[hArg]P[hArg] | Atz(Peg10)- | 498 |
| [Cha]SHKG[Oic][Nle]P[4-Cl—F] | [hArg63, 64, 66, 68; Cha69; Oic74; Nle75; | |
| | 4-Cl—F77]Apelin-17(61-77) | |
| [Atz(PEG10)]KF[hArg][hArg]QQP[hArg][Cha] | Atz(Peg10)- | 499 |
| SHKG[Oic][Nle]P[4-Cl—F] | [hArg63, 64, 68; Gln66; Cha69; Oic74; | |
| | Nle75; 4-Cl—F77]Apelin-17(61-77) | |
| [Atz(PEG10)]KF[hArg][hArg]Q[Cit]P[hArg] | Atz(Peg10)- | 500 |
| [Cha]SHKG[Oic][Nle]P[4-Cl—F] | [hArg63, 64, 68; Cit66; Cha69; Oic74; | |
| | Nle75; 4-Cl—F77]Apelin-17(61-77) | |
| [Atz(PEG10)]KF[hArg][Cit]Q[Cit]P[hArg] | Atz(Peg10)- | 501 |
| [Cha]SHKG[Oic][Nle]P[4-Cl—F] | [hArg63, 68; Cit64, 66; Cha69; Oic74; | |
| | Nle75; 4-Cl—F77]Apelin-17(61-77) | |
| [Atz(PEG10)]KF[Cit][Cit]Q[hArg]P[hArg] | Atz(Peg10)- | 502 |
| [Cha]SHKG[Oic][Nle]P[4-Cl—F] | [Cit63, 64; hArg66, 68; Cha69; Oic74; | |
| | Nle75; 4-Cl—F77]Apelin-17(61-77) | |
| [Atz(PEG10)]KF[Cit][Cit]Q[Cit]P[hArg][Cha] | Atz(Peg10)- | 503 |
| SHKG[Oic][Nle]P[4-Cl—F] | [Cit63, 64, 66; hArg68; Cha69; Oic74; | |
| | Nle75; 4-Cl—F77]Apelin-17(61-77) | |
| [Atz(PEG10)]OFRRQRP[hArg][Cha]SHKG[Oic] | Atz(Peg10)- | 504 |
| [Nle]P[4-Cl—F] | [Orn61; hArg68; Cha69; Oic74; Nle75; | |
| | 4-Cl—F77]Apelin-7(61-77) | |
| [Atz(PEG10)]OF[hArg][hArg]Q[hArg]P[hArg] | Atz(Peg10)- | 505 |
| [Cha]SHKG[Oic][Nle]P[4-Cl—F] | [Orn61; hArg63, 64, 66, 68; Cha69; Oic74; | |
| | Nle75; 4-Cl—F77]Apelin-17(61-77) | |
| [Atz(PEG10)]FRRQRP[hArg][Cha]SHKG[Oic] | Atz(Peg10)- | 506 |
| [Nle]P[4-Cl—F] | [hArg68; Cha69; Oic74; Nle75; | |
| | 4-Cl—F77]Apelin-17(62-77) | |
| [Atz(PEG10)]LRP[hArg][Cha]SHKG[Oic][Nle] | Atz(Peg10)- | 507 |
| P[4-Cl—F] | [Leu65; hArg68; Cha69; Oic74; Nle75; | |
| | 4-Cl—F77]Apelin-17(65-77) | |

[0380] Additional numbered embodiments are shown below.

[0381] 69. An isolated polypeptide comprising the amino acid sequence [Z]X₋₄X₋₃X₋₂X₋₁X₁X₂X₃X₄X₅X₆X₇X₈X₉X₁₀X₁₁X₁₂X₁₃, (SEQ ID NO: 129) wherein:

[0382] a) Z is any amino acid, a conjugation linker, an acyl group, an aryl group, an alkyl group, NPeg11, [Atz(PEG10)], a PEG derivative or other serum half-life prolonging group, or is absent,
[0383] b) X₋₄ is K, [Orn], [MerPr], [Pra], [Atz(PEG10)] or NPeg11,
[0384] c) X₋₃ is F, A, [Pra], [MerPr] or [Atz(PEG10)],
[0385] d) X₋₂ is R, [2Pal], [3Pal], [Cit], [Cit], [hArg], [Orn], [MerPr], A, E, F, H, I, K, L, P, Q, S, T, V, W, Y, [NMeArg], [Pra] or [Atz(PEG10)],
[0386] e) X₋₁ is R, [2Pal], [3Pal], [Cit], [hArg], [Orn], [Pra], [MerPr], A, E, F, H, I, K, L, P, Q, S, T, V, W, Y, [NMeArg] or [Atz(PEG10)],
[0387] f) X₁ is Q, N, E, D, L, V, I, P, H, W, F, Y, A, [1-Nal], [2-Nal], [Bip], [Cha], [Nle], [Pra], [MerPr], [PE] or [Atz(PEG10)],
[0388] g) X₂ is R, A, K, Q, [Pra], [MerPr], [2Pal], [3Pal], [4Pal], [Orn], [Dpr], [Dab], [hArg], [NMe-Arg], [Cit] or [Atz(PEG10)],
[0389] h) X₃ is P, [Oic], [Tic], A, R, [Aib], G, [Pra] or [Atz(PEG10)],
[0390] i) X₄ is R, K, Q, [2Pal], [3Pal], [4Pal], [Orn], [Dpr], [Dab], [hArg], [NMe-Arg], [Cit], [Pra], L or [Atz(PEG10)],
[0391] j) X₅ is L, A, F, Q, S, [2-Nal], [Bip], [Cha], [Chg], [pI-Phe], [Pra] or [NMeLeu],
[0392] k) X₆ is S, [1-Nal], [2-Nal], [2Pal], [3Pal], [4-Cl—F], [4-F—F], [4-I—F], [4-Me-F], [Abu], [Bip], [Cha], [Chg], [Cit], [Cpg], [Dab], [Dap], [Dip], [Nle], [NMe-Phe], [Nva], [Orn], [Atz(PEG10)], [Pra], [Tic], A, F, G, H, I, L, R, T, V, W or Y,
[0393] l) X₇ is H, [1-Nal], [2-Nal], [2Pal], [3Pal], [4-Cl—F], [4-F—F], [4-I—F], [Abu], [Bip], [Cha], [Chg], [Cpg], [Dab], [Dap], [Dip], [Nle], [NMe-Phe], [Nva], [Orn], [Atz(PEG10)], [Pra], [Tic], A, F, G, h, H, I, K, L, O, R, T, V, W, or Y,
[0394] m) X₈ is K, [1-Nal], [2-Nal], [2Pal], [3Pal], [4AmP], [4-Cl—F], [4-F—F], [44-F], [Bip],

[0395] [Cha], [Chg], [Cpg], [Dab], [Dap], [Dip], [Dpr], [hArg], [K(Me2)], [LYSIPR], [Nle], [Nva], [Orn], [Pra], A, F, G, H, R, V, W, or [Atz(PEG10)],
[0396] n) X₉ is G, [bAla], [Hyp], [Oic], [Pra], [Sar], [Thz], A, P, [Aib] or [Atz(PEG10)],
[0397] o) X₁₀ is P, [Oic], [hero], [Tic], [Tiq], [Thz], [1-Nal], [Pra] or [Atz(PEG10)], p) X₁₁ is M, [4-Cl—F], [4-F—F], [4-Me-F], [Bip], [Cha], [Nle], [NMeLeu], [pI-Phe], [Atz(PEG10)],[Pra], A, F, P or S,
[0398] q) X₁₂ is P, [1-Nal], [4-Cl—F], [4-F—F], [4-Me-F], [D-1Nal], [D-Bip], [Nle], [NMePhe], [Oic], [Tic], f, F, w, y, G, [Pra] or [Atz(PEG10)], and
[0399] r) X₁₃ is F, [1-Nal], [2-Nal], [4-Cl—F], [4-F—F], [4-Me-F], [4-NO2-F], [D-1Nal], [D-Bip], [NMePhe], [pI-Phe], [Atz(PEG10)], [Pra], A, K, f, G, P, w, W, y, Y, Y, [4-Cl—F], [4-F—F], [2-Nal], [Bip], [Dip] or [Tic] in either in the L- or D-optical configuration, other aromatic amino acid either in the L- or D-optical configuration.

[0400] 70. The isolated polypeptide of Embodiment 69 wherein at least four amino acid residues in the X positions are amino acids not present at residues Nos. 61-77 in the sequence of wild-type Apelin (SEQ ID NO: 138) and the polypeptide has increased proteolytic stability and/or an increased plasma/serum residence time relative to wild type Apelin-13 (SEQ ID NO:2).

[0401] 71. The isolated polypeptide of Embodiment 69 comprising a PEG derivative or other moiety to extend circulating half-life, wherein said derivative or moiety is or is not attached via a linker.

[0402] 72. An APJ agonist having an amino acid sequence selected from the group of sequences consisting of: SEQ ID NOs: 132; 137; 196-199; 377; 455; 508-1095; 1154; 1172-1177; 1425; 1440-1449; and 1560. The following table shows examples of embodiments 69-72. In the table, the free acid can be a carboxylic acid and the amide can be at the C-terminus

TABLE 8

| | | SEQ |
|---|---|---|
| AMINO ACID SEQUENCE | DESIGNATION | ID NO. |
| {Hydrogen}[PE]RP[hArg][NMeLeu] | [PE65; hArg68; NMeLeu69; Phe70, 75; | 508 |
| FHKPPFPF{FreeAcid} | Pro73]Apelin-13(65-77) | |
| {Hydrogen}[PE]RP[hArg][NMeLeu]SHKGP | [PE65; hArg68; NMeLeu69; pI-Phe75; | 509 |
| [pI-Phe]P[4-F—F]{FreeAcid} | 4-F—F77]Apelin-13(65-77) | |
| {Hydrogen}[PE]RP[hArg][Cha]SHKGP | [PE65; hArg68; Cha69; pI-Phe75; | 510 |
| [pI-Phe]P[4-F—F]{FreeAcid} | 4-F—F77]Apelin-13(65-77) | |
| {Hydrogen}[PE]RP[hArg][NMeLeu]SHKGP | [PE65; hArg68; NMeLeu69; pI-Phe75; | 511 |
| [pI-Phe]P[4-Me—F]{FreeAcid} | 4-Me—F77]Apelin-13(65-77) | |
| {Hydrogen}[PE]RP[hArg][Cha]SHKGP | [PE65; hArg68; Cha69; pI-Phe75; | 512 |
| [pI-Phe]P[4-Me—F]{FreeAcid} | 4-Me—F77]Apelin-13(65-77) | |
| {Hydrogen}[PE]RP[hArg][Cha]SHKGP | [PE65; hArg68; Cha69; Nle75; | 513 |
| [Nle]P[4-Me—F]{FreeAcid} | 4-Me—F77]Apelin-13(65-77) | |
| {Hydrogen}[PE]RP[hArg][Cha]SHKGP | [PE65; hArg68; Cha69; Nle75; D- | 514 |
| [Nle]P[D-Bip]{FreeAcid} | Bip77]Apelin-13(65-77) | |
| {Hydrogen}[PE]RP[hArg][NMeLeu]SHKGP | [PE65; hArg68; NMeLeu69; Nle75; D- | 515 |
| [Nle]P[D-1Nal]{FreeAcid} | 1Nal77]Apelin-13(65-77) | |
| {Hydrogen}[PE]RP[hArg][NMeLeu]SHKGP | [PE65; hArg68; NMeLeu69; pI-Phe75; D- | 516 |
| [pI-Phe]P[D-1Nal]{FreeAcid} | 1Nal77]Apelin-13(65-77) | |
| {Hydrogen}[PE]RP[hArg][Cha]SHKGP | [PE65; hArg68; Cha69; pI-Phe75; D- | 517 |
| [pI-Phe]P[D-1Nal]{FreeAcid} | 1Nal77]Apelin-13(65-77) | |
| {Hydrogen}[PE]RP[hArg][Cha]SHKGP | [PE65; hArg68; Cha69; Nle75; D- | 518 |
| [Nle]P[D-1Nal]{FreeAcid} | 1Nal77]Apelin-13(65-77) | |
| (Hydrogen}[PE]RP[hArg][Cha]SHKGP | [PE65; hArg68; Cha69; pI-Phe75, 77]Apelin- | 519 |
| [pI-Phe]P[pI-Phe]{FreeAcid} | 13(65-77) | |
| (Hydrogen}[PE]RP[hArg][Cha]SHKGP | [PE65; hArg68; Cha69; pI- | 520 |
| [pI-Phe]PY{FreeAcid} | Phe75; Tyr77]Apelin-13(65-77) | |
| (Hydrogen}[PE]RP[hArg][Cha]SHKGP | [PE65; hArg68; Cha69; Nle75; pI- | 521 |
| [Nle]P[pI-Phe]{FreeAcid} | Phe77]Apelin-13(65-77) | |
| {Hydrogen}[PE]RP[hArg][Cha]SHKGP | [PE65; hArg68; Cha69; pI-Phe75; D- | 522 |
| [pI-Phe]Pf{FreeAcid} | Phe77]Apelin-13(65-77) | |
| {Hydrogen}[PE]RP[hArg][Cha]SHKGP | [PE65; hArg68; Cha69; Nle75; D- | 523 |
| [Nle]Pf{FreeAcid} | Phe77]Apelin-13(65-77) | |
| {Hydrogen}[PE]RP[hArg][NMeLeu]SHKGP | [PE65; hArg68; NMeLeu69; Nle75; | 524 |
| [Nle]P[NMePhe]{Amide} | NMePhe77]Apelin-13(65-77)-amide | |
| {Hydrogen}[PE]RP[hArg][NMeLeu]SHKGP | [PE65; hArg68; NMeLeu69; Nle75; D- | 525 |
| [Nle]Pw{FreeAcid} | Trp77]Apelin-13(65-77) | |
| {Hydrogen}[PE]RP[hArg][NMeLeu]SHKGP | [PE65; hArg68; NMeLeu69; pI-Phe75; D- | 526 |
| [pI-Phe]Pw{FreeAcid} | Trp77]Apelin-13(65-77) | |
| {Hydrogen}[PE]RP[hArg][Cha]SHKGP | [PE65; hArg68; Cha69; pI-Phe75; D- | 527 |
| [pI-Phe]Pw{FreeAcid} | Trp77]Apelin-13(65-77) | |
| {Hydrogen}[PE]RP[hArg][Cha]SHKGP | [PE65; hArg68; Cha69; Nle75; D- | 528 |
| [Nle]Pw{FreeAcid} | Trp77]Apelin-13(65-77) | |
| {Hydrogen}[PE]RP[hArg][Cha]SHKGP | [PE65; hArg68; Cha69; Nle75; Tyr77]Apelin- | 529 |
| [Nle]PY{FreeAcid} | 13(65-77) | |
| {Hydrogen}[PE]RP[hArg][NMeLeu]SHKGP | [PE65; hArg68; NMeLeu69; Nle75; D- | 530 |
| [Nle]Py{FreeAcid} | Tyr77]Apelin-13(65-77) | |
| {Hydrogen}[PE]RP[hArg][NMeLeu]SHKGP | [PE65; hArg68; NMeLeu69; pI-Phe75; D- | 531 |
| [pI-Phe]Py{FreeAcid} | Tyr77]Apelin-13(65-77) | |
| (Hydrogen}[PE]RP[hArg][Cha]SHKGP | [PE65; hArg68; Cha69; pI-Phe75; D- | 532 |
| [pI-Phe]Py{FreeAcid} | Tyr77]Apelin-13(65-77) | |
| (Hydrogen}[PE]RP[hArg][Cha]SHKGP | [PE65; hArg68; Cha69; Nle75; D- | 533 |
| [Nle]Py{FreeAcid} | Tyr77]Apelin-13(65-77) | |
| {Hydrogen}[PE]RP[hArg][NMeLeu]FHKGP | [PE65; hArg68; NMeLeu69; Phe70; pI- | 534 |
| [pI-Phe]P[2-Nal]{FreeAcid} | Phe75; 2-Nal77]Apelin-13(65-77) | |
| {Hydrogen}[PE]RP[hArg][NMeLeu]FHKGP | [PE65; hArg68; NMeLeu69; Phe70; Nle75; D- | 535 |
| [Nle]P[D-Bip]{Amide} | Bip77]Apelin-13(65-77)-amide | |
| {Hydrogen}[PE]RP[hArg][NMeLeu]FHKGP | [PE65; hArg68; NMeLeu69; Phe70; Nle75; D- | 536 |
| [Nle]P[D-Bip]{FreeAcid} | Bip77]Apelin-13(65-77) | |
| {Hydrogen}[PE]RP[hArg][NMeLeu]FHKGP | [PE65; hArg68; NMeLeu69; Phe70; pI- | 537 |
| [pI-Phe]P[D-Bip]{FreeAcid} | Phe75; D-Bip77]Apelin-13(65-77) | |
| {Palmitoyl}LRP[hArg][NMeLeu]FHKGP | Palmitoyl- | 538 |
| [Nle]P[D-Bip]{FreeAcid} | [Leu65; hArg68; NMeLeu69; Phe70; Nle75; D- | |
| | Bip77]Apelin-13(65-77) | |
| {Hydrogen}[PE]RP[hArg][Cha]SHKGP | [PE65; hArg68; Cha69; pI-Phe75; D- | 539 |
| [pI-Phe]P[D-Bip]{FreeAcid} | Bip77]Apelin-13(65-77) | |
| {Hydrogen}[PE]RP[hArg][NMeLeu]SHKGP | [PE65; hArg68; NMeLeu69; Nle75; | 540 |
| [Nle]P[4-Me—F]{FreeAcid} | 4-Me—F77]Apelin-13(65-77) | |
| {Hydrogen}[PE]RP[hArg][NMeLeu]FHKGP | [PE65; hArg68; NMeLeu69; Phe70; pI- | 541 |
| [pI-Phe]P[D-Bip]{Amide} | Phe75; D-Bip77]Apelin-13(65-77)-amide | |
| {Hydrogen}[PE]RP[hArg][Cha]SHKGP | [PE65; hArg68; Cha69; Nle75; D- | 542 |
| [Nle]Pf{Amide} | Phe77]Apelin-13(65-77)-amide | |
| {Hydrogen}[PE]RP[hArg][NMeLeu]SHKGP | [PE65; hArg68; NMeLeu69; Nle75; | 543 |
| [Nle]P[4-Cl—F]{Amide} | 4-Cl—F77]Apelin-13(65-77)-amide | |
| {Hydrogen}[PE]RP[hArg][NMeLeu]SHKGP | [PE65; hArg68; NMeLeu69; Nle75; | 544 |
| [Nle]P[4-Me—F]{Amide} | 4-Me—F77]Apelin-13(65-77)-amide | |
| {Hydrogen}[PE]RP[hArg][NMeLeu]SHKGP | [PE65; hArg68; NMeLeu69; Nle75; Bip77]Apelin- | 545 |
| [Nle]P[Bip]{Amide} | 13(65-77)-amide | |
| {Hydrogen}[PE]RP[hArg][NMeLeu]SHKGP | [PE65; hArg68; NMeLeu69; Nle75; D- | 546 |
| [Nle]P[D-Bip]{Amide} | Bip77]Apelin-13(65-77)-amide | |
| {Hydrogen}[PE]RP[hArg][NMeLeu]SHKGP | [PE65; hArg68; NMeLeu69; Nle75; | 547 |
| [Nle]P[4-NO2—F]{Amide} | 4-NO2—F77]Apelin-13(65-77)-amide | |
| {Hydrogen}[PE]RP[hArg][NMeLeu]SHKG | [PE65; hArg68; NMeLeu69; 1- | 548 |
| [1-Nal][Nle]P[4-Cl—F]{Amide} | Nal74; Nle75; 4-Cl—F77]Apelin-13(65-77)- | |
| | amide | |
| {Hydrogen}[PE]RP[hArg][NMeLeu]FHKG | [PE65; hArg68; NMeLeu69; Phe70; 1- | 549 |
| [1-Nal][Nle]P[4-Cl—F]{Amide} | Nal74; Nle75; 4-Cl—F77]Apelin-13(65-77)- | |
| | amide | |
| {Hydrogen}[PE]RP[hArg][NMeLeu]FHKGP | [PE65; hArg68; NMeLeu69; Phe70; Nle75; 4- | 550 |
| [Nle]P[4-Cl—F]{Amide} | Cl—F77]Apelin-13(65-77)-amide | |
| {Hydrogen}[PE]RP[hArg][NMeLeu]SAKG | [PE65; hArg68; NMeLeu69; Ala71; 1- | 551 |
| [1-Nal][Nle]P[4-Cl—F]{Amide} | Nal74; Nle75; 4-Cl—F77]Apelin-13(65-77)- | |
| | amide | |
| {Hydrogen}[PE]RP[hArg][NMeLeu]FAKG | [PE65; hArg68; NMeLeu69; Phe70; Ala71; 1- | 552 |
| [1-Nal][Nle]P[4-Cl—F]{Amide} | Nal74; Nle75; 4-Cl—F77]Apelin-13(65-77)- | |
| | amide | |
| {Hydrogen}[PE]RP[hArg][NMeLeu]FAKGP | [PE65; hArg68; NMeLeu69; Phe70; Ala71; Nle | 553 |
| [Nle]P[4-Cl—F]{Amide} | 75; 4-Cl—F77]Apelin-13(65-77)-amide | |
| {Hydrogen}[PE]RP[hArg][NMeLeu]S[1- | [PE65; hArg68; NMeLeu69; 1- | 554 |
| Nal]KG[1-Nal][Nle]P[4-Cl—F]{Amide} | Nal71, 74; Nle75; 4-Cl—F77]Apelin-13(65- | |
| | 77)-amide | |
| {Hydrogen}[PE]RP[hArg][NMeLeu]F[1- | [PE65; hArg68; NMeLeu69; Phe70; 1- | 555 |
| Nal]KG[1-Nal][Nle]P[4-Cl—F]{Amide} | Nal71, 74; Nle75; 4-Cl—F77]Apelin-13(65- | |
| | 77)-amide | |
| {Hydrogen}[PE]RP[hArg][NMeLeu]F[1- | [PE65; hArg68; NMeLeu69; Phe70; 1- | 556 |
| Nal]KGP[Nle]P[4-Cl—F]{Amide} | Nal71; Nle75; 4-Cl—F77]Apelin-13(65-77)- | |
| | amide | |
| {Hydrogen}[PE]RP[hArg][NMeLeu]F[1- | [PE65; hArg68; NMeLeu69; Phe70; 1- | 557 |
| Nal]KGP[Nle]P[4-Cl—F]{Amide} | Nal71; Nle75; 4-Cl—F77]Apelin-13(65-77)- | |
| | amide | |
| {Hydrogen}[PE]RP[hArg][NMeLeu][NMePhe] | [PE65; hArg68; NMeLeu69; NMePhe70; 1- | 558 |
| [1-Nal]KGP[Nle]P[4-Cl—F]{Amide} | Nal71; Nle75; 4-Cl—F77]Apelin-13(65-77)- | |
| | amide | |
| {Hydrogen}[PE]RP[hArg][NMeLeu][NMePhe] | [PE65; hArg68; NMeLeu69; NMePhe70; Ala71; | 559 |
| AKG[1-Nal][Nle]P[4-Cl—F]{Amide} | 1-Nal74; Nle75; 4-Cl—F77]Apelin-13(65- | |
| | 77)-amide | |
| {Hydrogen}[PE]RP[hArg][NMeLeu][NMePhe] | [PE65; hArg68; NMeLeu69; NMePhe70; Ala71; | 560 |
| AKG[1-Nal][Nle]P[4-Cl—F]{Amide} | 1-Nal74; Nle75; 4-Cl—F77]Apelin-13(65- | |
| | 77)-amide | |
| {Hydrogen}[PE]RP[hArg][NMeLeu]F[2-Nal] | [PE65; hArg68; NMeLeu69; Phe70; 2- | 561 |
| KG[1-Nal][Nle]P[4-Cl—F]{Amide} | Nal71; 1-Nal74; Nle75; 4-Cl—F77]Apelin- | |
| | 13(65-77)-amide | |
| {Hydrogen}[PE]RP[hArg][NMeLeu]F[2-Nal] | [PE65; hArg68; NMeLeu69; Phe70; 2- | 562 |
| KGP[Nle]P[4-Cl—F]{Amide} | Nal71; Nle75; 4-Cl—F77]Apelin-13(65-77)- | |
| | amide | |
| {Hydrogen}[PE]RP[hArg][NMeLeu][NMePhe] | [PE65; hArg68; NMeLeu69; NMePhe70; 2- | 563 |
| [2-Nal]KGP[Nle]P[4-Cl—F]{Amide} | Nal71; Nle75; 4-Cl—F77]Apelin-13(65-77)- | |
| | amide | |
| [PE]RP[hArg][NMeLeu]SHKGP[Nle]P | [PE65; hArg68; NMeLeu69; Nle75; D- | 564 |
| [D-Bip] | Bip77]Apelin-13(65-77) | |
| [PE]RP[hArg][NMeLeu]SHKGP[pI- | [PE65; hArg68; NMeLeu69; pI-Phe75; D- | 565 |
| Phe]P[D-Bip] | Bip77]Apelin-13(65-77) | |
| [PE]RP[hArg][NMeLeu]SHKGP[pI- | [PE65; hArg68; NMeLeu69; pI-Phe75; 2- | 566 |
| Phe]P[2-Nal] | Nal77]Apelin-13(65-77) | |
| {Palmitoyl}LRP[hArg][NMeLeu]SHKGP | Palmitoyl-Leu65; hArg68; NMeLeu69; pI- | 567 |
| [pI-Phe]P[D-Bip]{Amide} | Phe75; D-Bip77]Apelin-13(65-77) | |
| [PE]RP[hArg][NMeLeu]SHKGP[Nle]P | PE65; hArg68; NMeLeu69; Nle75; D- | 568 |
| [D-Bip]K(Palmitoyl){Amide} | Bip77; K(Palmitoyl)78]Apelin-13(65-78)- | |
| | amide | |
| [PE]RP[hArg][NMeLeu]SHKGP[Nle]P | [PE65; hArg68; NMeLeu69; Nle75; 2- | 569 |
| [2-Nal] | Nal77]Apelin-13(65-77) | |
| [PE]RP[hArg][NMeLeu]SHKGP[pI- | [PE65; hArg68; NMeLeu69; pI-Phe75; | 570 |
| Phe]P[4-Cl—F] | 4-Cl—F77]Apelin-13(65-77) | |
| [PE]RP[hArg][NMeLeu]SHKGP[Nle]P[4- | [PE65; hArg68; NMeLeu69; Nle75; | 571 |
| Cl—F] | 4-Cl—F77]Apelin-13(65-77) | |
| [PE]RP[hArg][NMeLeu]SHKGP[Nle]P[4- | [PE65; hArg68; NMeLeu69; Nle75; | 572 |
| F—F] | 4-F—F77]Apelin-13(65-77) | |
| [PE]RP[hArg][Cha]SHKGP[Nle]P[4-F—F] | [PE65; hArg68; Cha69; Nle75; | 573 |
| | 4-F—F77]Apelin-13(65-77) | |
| [PE]RP[hArg][NMeLeu]SHKGP[Nle]P[pI- | [PE65; hArg68; NMeLeu69; Nle75; pI- | 574 |
| Phe] | Phe77]Apelin-13(65-77) | |
| [PE]RP[hArg][NMeLeu]SHKGP[Nle]Pf | [PE65; hArg68; NMeLeu69; Nle75; D- | 575 |
| | Phe77]Apelin-13(65-77) | |
| (Palmitoyl}LRP[hArg][NMeLeu]SHKGP | Palmitoyl-Leu65; hArg68; NMeLeu69; pI- | 576 |
| [pI-Phe]P[D-Bip]{Amide} | Phe75; D-Bip77]Apelin-13(65-77) | |
| [PE]RP[hArg][NMeLeu]SHKGP[Nle]P[D- | PE65; hArg68; NMeLeu69; Nle75; D- | 577 |
| Bip]K(Palmitoyl){Amide} | Bip77; K(Palmitoyl)78]Apelin-13(65-78)- | |
| | amide | |
| [PE]RP[hArg][Cha]SHKGP[pI-Phe]P[2- | [PE65; hArg68; Cha69; pI-Phe75; 2- | 578 |
| Nal] | Nal77]Apelin-13(65-77) | |
| {Acetyl}[Pra]LRP[hArg][NMeLeu][Pra] | Ac-Pra- | 579 |
| HKGP[Nle]P[4-Cl—F]{FreeAcid} | [Leu65; hArg68; NMeLeu69; Pra70; Nle75; 4- | |
| | Cl—F77]Apelin-13(65-77) | |
| {Acetyl}[Pra]LRP[hArg][NMeLeu][Pra] | Ac-Pra- | 580 |
| HKGP[Nle]P[4-Cl—F]{FreeAcid} | [Leu65; hArg68; NMeLeu69; Pra70; Nle75; 4- | |
| | Cl—F77]Apelin-13(65-77) | |
| {Acetyl}[Pra]LRP[NMeArg][NMeLeu][Pra] | Ac-Pra- | 581 |
| HKGP[Nle]P[4-Cl—F]{FreeAcid} | [Leu65; NMeArg68; NMeLeu69; Pra70; Nle75; | |
| | 4-Cl—F77]Apelin-13(65-77) | |
| {Acetyl}[Pra]L[NMeArg]P [hArg][NMeLeu] | Ac-Pra- | 582 |
| [Pra]HKGP[Nle]P[4-Cl—F]{FreeAcid} | [Leu65; NMeArg66; hArg68; NMeLeu69; Pra70; | |
| | Nle75; 4-Cl—F77]Apelin-13(65-77) | |
| {Acetyl}[Pra]L[NMeArg]P[NMeArg] | Ac-Pra- | 583 |
| [NMeLeu][Pra]HKGP[Nle]P[4- | [Leu65; NMeArg66, 68; NMeLeu69; Pra70; Nle75; | |
| Cl—F]{FreeAcid} | 4-Cl—F77]Apelin-13(65-77) | |
| [PE]RP[hArg][NMeLeu][Pra]HKG[Oic] | [PE65; hArg68; NMeLeu69; Pra70; Oic74; Nle75; | 584 |
| [Nle]P[4-Cl—F]{FreeAcid} | 4-Cl—F77]Apelin-13(65-77) | |
| [PE]RP[hArg][NMeLeu][Pra]HKG[Oic] | [PE65; hArg68; NMeLeu69; Pra70; Oic74; Nle75; | 585 |
| [Nle]P[4-Cl—F]{FreeAcid} | 4-Cl—F77]Apelin-13(65-77) | |
| [PE]RP[NMeArg][NMeLeu][Pra]HKG[Oic] | [PE65; NMeArg68; NMeLeu69; Pra70; Oic74; | 586 |
| [Nle]P[4-Cl—F]{FreeAcid} | Nle75; 4-Cl—F77]Apelin-13(65-77) | |
| [PE][NMeArg]P[hArg][NMeLeu][Pra] | [PE65; NMeArg66; hArg68; NMeLeu69; Pra70; | 587 |
| HKG[Oic][Nle]P[4-Cl—F]{FreeAcid} | Oic74; Nle75; 4-Cl—F77]Apelin-13(65-77) | |
| [PE][NMeArg]P[NMeArg][NMeLeu][Pra] | [PE65; NMeArg66, 68; NMeLeu69; Pra70; Oic74; | 588 |
| HKG[Oic][Nle]P[4-Cl—F]{FreeAcid} | Nle75; 4-Cl—F77]Apelin-13(65-77) | |
| {Hydrogen}[PE]RP[hArg]LFHKGPF[1- | [PE65; hArg68; Phe70, 75; 1-Nal76]Apelin- | 589 |
| Nal]F{FreeAcid} | 13(65-77) | |
| {Hydrogen}[PE]RPR[Chg]FHKGPF[1- | [PE65; Chg69; Phe70, 75; 1-Nal76]Apelin- | 132 |
| Nal]F{FreeAcid} | 13(65-77) | |
| {Hydrogen}[PE]RPR[NMeLeu]FHKGPF | [PE65; NMeLeu69; Phe70, 75; 1- | 137 |
| [1-Nal]F{FreeAcid} | Nal76]Apelin-13(65-77) | |
| {Hydrogen}[PE]RPR[Cha]FHKGP[Nle] | [PE65; Cha69; Phe70; Nle75; 1-Nal76]Apelin- | 196 |
| [1-Nal]F{FreeAcid} | 13(65-77) | |
| {Hydrogen}[PE]RPRLFHKGP[Nle][1- | [PE65; Phe70; Nle75; 1-Nal76]Apelin-13(65- | 197 |
| Nal]F{FreeAcid} | 77) | |
| {Hydrogen}[PE]RP[hArg][Cha]FHKGP | [PE65; hArg68; Cha69; Phe70; Nle75; 1- | 198 |
| [Nle][1-Nal]F{FreeAcid} | Nal76]Apelin-13(65-77) | |
| {Hydrogen}[PE]RP[hArg]LFHKGP[Nle] | [PE65; hArg68; Phe70; Nle75; 1- | 199 |
| [1-Nal]F{FreeAcid} | Nal76]Apelin-13(65-77) | |
| {Hydrogen}[PE]RPR[Chg]FHKGP[Nle] | [PE65; Chg69; Phe70; Nle75; 1-Nal76]Apelin- | 377 |
| [1-Nal]F{FreeAcid} | 13(65-77) | |
| {Hydrogen}[PE]RPRLFHKGPF[1- | [PE65; Phe70, 75; 1-Nal76]Apelin-13(65-77) | 455 |
| Nal]F{FreeAcid} | | |
| {Hydrogen}[PE]RPR[Cha]FHKGPM[1- | [PE65; Cha69; Phe70; 1-Nal76]Apelin-13(65- | 595 |
| Nal]F{FreeAcid} | 77) | |
| {Hydrogen}[PE]RP[hArg][Cha]FHKGPM | [PE65; hArg68; Cha69; Phe70; 1- | 1014 |
| [1-Nal]F{FreeAcid} | Nal76]Apelin-13(65-77) | |
| {Hydrogen}[PE]RPRLFHKGPM[1- | [PE65; Phe70; 1-Nal76]Apelin-13(65-77) | 1075 |
| Nal]F{FreeAcid} | | |
| {Hydrogen}[PE]RP[hArg]LFHKGPM[1- | [PE65; hArg68; Phe70; 1-Nal76]Apelin- | 1154 |
| Nal]F{FreeAcid} | 13(65-77) | |
| {Hydrogen}[PE]RPR[Chg]FHKG, PM[1- | [PE65; Chg69; Phe70; 1-Nal76]Apelin-13(65- | 1172 |
| Nal]F{FreeAcid} | 77) | |
| {Hydrogen}[PE]RPR[NMeLeu]FHKGPM | [PE65; NMeLeu69; Phe70; 1-Nal76]Apelin- | 1173 |
| [1-Nal]F{FreeAcid} | 13(65-77) | |
| {Hydrogen}[PE]RPR[Cha]FHKGPF[1- | [PE65; Cha69; Phe70, 75; 1-Nal76]Apelin- | 1174 |
| Nal]F{FreeAcid} | 13(65-77) | |
| {Hydrogen}[PE]RP[hArg][Cha]FHKGPF | [PE65; hArg68; Cha69; Phe70, 75; 1- | 1175 |
| [1-Nal]F{FreeAcid} | Nal76]Apelin-13(65-77) | |
| {Hydrogen}[PE]RPR[NMeLeu]FHKGP | [PE65; NMeLeu69; Phe70; Nle75; 1- | 1176 |
| [Nle][1-Nal]F{FreeAcid} | Nal76]Apelin-13(65-77) | |
| {Hydrogen}[PE]RP[hArg][Cha]FHKGP | [PE65; hArg68; Cha69; Phe70; pI-Phe75; 1- | 1177 |
| [pI-Phe][1-Nal]F{FreeAcid} | Nal76]Apelin-13(65-77) | |
| {Hydrogen}[PE]RP[hArg]LFHKGP[pI- | [PE65; hArg68; Phe70; pI-Phe75; 1- | 1425 |
| Phe][1-Nal]F{FreeAcid} | Nal76]Apelin-13(65-77) | |
| {Hydrogen}[PE]RPR[NMeLeu]FHKGP | [PE65; NMeLeu69; Phe70; pI-Phe75; 1- | 1440 |
| [pI-Phe][1-Nal]F{FreeAcid} | Nal76]Apelin-13(65-77) | |
| [PE]RP[hArg][Cha]SHKGP[Nle][4- | PE65; hArg68; Cha69; Nle75; | 1441 |
| Cl—F]K(palmitoyl){Amide} | 4-Cl—F77; K(Palmitoyl)78]Apelin-13(65-78)- | |
| | amide | |
| [PE]RP[hArg][Cha]SHKGP[Nle][D- | PE65; hArg68; Cha69; Nle75; D- | 1442 |
| 1Nal]K(palmitoyl){Amide} | 1Nal77; K(Palmitoyl)78]Apelin-13(65-78)- | |
| | amide | |
| {Acetyl}[Pra]LRP[hArg][NMeLeu][Pra] | Ac-Pra- | 1443 |
| HKGP[Nle][Oic][4- | [Leu65; hArg68; NMeLeu69; Pra70; Nle75; | |
| Cl—F]{FreeAcid} | Oic76; 4-Cl—F77]Apelin-13(65-77) | |
| {Acetyl}[Pra]LRP[hArg][NMeLeu][Pra] | Ac-Pra- | 1444 |
| HKG[Oic][Nle][Oic][4- | [Leu65; hArg68; NMeLeu69; Pra70; Oic74, 76; | |
| Cl—F]{FreeAcid} | Nle75; 4-Cl—F77]Apelin-13(65-77) | |
| {Acetyl}[Pra]LRP[hArg][NMeLeu][Pra] | Ac-Pra- | 1445 |
| HKG[Oic][Nle][Tic][4- | [Leu65; hArg68; NMeLeu69; Pra70; Oic74; | |
| Cl—F]{FreeAcid} | Nle75; Tic76; 4-Cl—F77]Apelin-13(65-77) | |
| [PE]RP[hArg][NMeLeu][Pra]HKG[Oic] | [PE65; hArg68; NMeLeu69; Pra70; Oic74, 76; | 1446 |
| [Nle][Oic][4-Cl—F]{FreeAcid} | Nle75; 4-Cl—F77]Apelin-13(65-77) | |
| {Hydrogen}[PE]RP[hArg]LFHKGPF[1- | [PE65; hArg68; Phe70, 75; 1-Nal76]Apelin- | 1447 |
| Nal]F{FreeAcid} | 13(65-77) | |
| {Hydrogen}[PE]RP[hArg]LFKKPPFPF{FreeAcid} | [PE65; hArg68; Phe70, 75; Lys71; Pro73]Apelin- | 1448 |
| | 13(65-77) | |
| {Hydrogen}[PE]RPR[Chg]FHKPPFPF{FreeAcid} | [PE65; Chg69; Phe70, 75; Pro73]Apelin- | 1449 |
| | 13(65-77) | |
| {Hydrogen}[PE]RPR[Chg]SHKPPF[1- | [PE65; Chg69; Pro73; Phe75; 1-Nal76]Apelin- | 1560 |
| Nal]F{FreeAcid} | 13(65-77) | |
| {Hydrogen}[PE]RPR[Chg]FHKGPF[1- | [PE65; Chg69; Phe70, 75; 1-Nal76]Apelin- | 590 |
| Nal]F{FreeAcid} | 13(65-77) | |
| {Hydrogen}[PE]RPR[Chg]FKKPPF[1- | [PE65; Chg69; Phe70, 75; Lys71; Pro73; 1- | 591 |
| Nal]F{FreeAcid} | Nal76]Apelin-13(65-77) | |
| {Hydrogen}[PE]RPR[Chg]FKKPPFPF{FreeAcid} | [PE65; Chg69; Phe70, 75; Lys71; Pro73]Apelin- | 592 |
| | 13(65-77) | |
| {Hydrogen}[PE]RPR[NMeLeu]FHKPPFPF{FreeAcid} | [PE65; NMeLeu69; Phe70, 75; Pro73]Apelin- | 593 |
| | 13(65-77) | |
| {Hydrogen}[PE]RPR[NMeLeu]SHKPPF | [PE65; NMeLeu69; Pro73; Phe75; 1- | 594 |
| [1-Nal]F{FreeAcid} | Nal76]Apelin-13(65-77) | |
| {Hydrogen}[PE]RPR[NMeLeu]FHKPPF | [PE65; NMeLeu69; Phe70, 75; Pro73; 1- | 596 |
| [1-Nal]F{FreeAcid} | Nal76]Apelin-13(65-77) | |
| {Hydrogen}[PE]RPR[NMeLeu]FHKGPF | [PE65; NMeLeu69; Phe70, 75; 1- | 597 |
| [1-Nal]F{FreeAcid} | Nal76]Apelin-13(65-77) | |
| {Hydrogen}[PE]RPR[NMeLeu]FKKPPFPF{FreeAcid} | [PE65; NMeLeu69; Phe70, 75; Lys71; | 598 |
| | Pro73]Apelin-13(65-77) | |
| {Hydrogen}[PE]RPR[Cha]FHKPP[Nle]PF{FreeAcid} | [PE65; Cha69; Phe70; Pro73; Nle75]Apelin- | 599 |
| | 13(65-77) | |
| {Hydrogen}[PE]RPR[Cha]SHKPP[Nle] | [PE65; Cha69; Pro73; Nle75; 1-Nal76]Apelin- | 600 |
| [1-Nal]F{FreeAcid} | 13(65-77) | |
| {Hydrogen}[PE]RPR[Cha]FHKPP[Nle] | [PE65; Cha69; Phe70; Pro73; Nle75; 1- | 601 |
| [1-Nal]F{FreeAcid} | Nal76]Apelin-13(65-77) | |
| {Hydrogen}[PE]RPR[Cha]FHKGP[Nle] | [PE65; Cha69; Phe70; Nle75; 1-Nal76]Apelin- | 602 |
| [1-Nal]F{FreeAcid} | 13(65-77) | |
| {Hydrogen}[PE]RPR[Cha]FKKPP[Nle] | [PE65; Cha69; Phe70; Lys71; Pro73; Nle75; 1- | 603 |
| [1-Nal]F{FreeAcid} | Nal76]Apelin-13(65-77) | |
| {Hydrogen}[PE]RPR[Cha]FKKPP[Nle] | [PE65; Cha69; Phe70; Lys71; Pro73; | 604 |
| PF{FreeAcid} | Nle75]Apelin-13(65-77) | |
| {Hydrogen}[PE]RP[hArg][Cha]SHKPP | [PE65; hArg68; Cha69; Pro73; Nle75]Apelin- | 605 |
| [Nle]PF{FreeAcid} | 13(65-77) | |
| (Hydrogen}[PE]RP[hArg][Cha]FHKPP | [PE65; hArg68; Cha69; Phe70; Pro73; | 606 |
| [Nle]PF{FreeAcid} | Nle75]Apelin-13(65-77) | |
| (Hydrogen}[PE]RP[hArg][Cha]SHKPP | [PE65; hArg68; Cha69; Pro73; Nle75; 1- | 607 |
| [Nle][1-Nal]F{FreeAcid} | Nal76]Apelin-13(65-77) | |
| (Hydrogen}[PE]RP[hArg][Cha]FHKPP | [PE65; hArg68; Cha69; Phe70; Pro73; Nle75; | 608 |
| [Nle][1-Nal]F{FreeAcid} | 1-Nal76]Apelin-13(65-77) | |
| (Hydrogen}[PE]RP[hArg][Cha]FHKGP | [PE65; hArg68; Cha69; Phe70; Nle75; 1- | 609 |
| [Nle][1-Nal]F{FreeAcid} | Nal76]Apelin-13(65-77) | |
| (Hydrogen}[PE]RP[hArg][Cha]FKKPP | [PE65; hArg68; Cha69; Phe70; Lys71; Pro73; | 610 |
| [Nle][1-Nal]F{FreeAcid} | Nle75; 1-Nal76]Apelin-13(65 -77) | |
| (Hydrogen}[PE]RP[hArg][Cha]FKKPP | [PE65; hArg68; Cha69; Phe70; Lys71; Pro73; | 611 |
| [Nle]PF{FreeAcid} | Nle75]Apelin-13(65-77) | |
| {Hydrogen}[PE]RP[hArg]LFHKPP[Nle] | [PE65; hArg68; Phe70; Pro73; Nle75]Apelin- | 612 |
| PF{FreeAcid} | 13(65-77) | |
| (Hydrogen}[PE]RP[hArg]LSHKPP[Nle] | [PE65; hArg68; Pro73; Nle75; 1- | 613 |
| [1-Nal]F{FreeAcid} | Nal76]Apelin-13(65-77) | |
| (Hydrogen}[PE]RP[hArg]LFHKPP[Nle] | [PE65; hArg68; Phe70; Pro73; Nle75; 1- | 614 |
| [1-Nal]F{FreeAcid} | Nal76]Apelin-13(65-77) | |
| {Hydrogen}[PE]RP[hArg]LFHKGP[Nle] | [PE65; hArg68; Phe70; Nle75; 1- | 615 |
| [1-Nal]F{FreeAcid} | Nal76]Apelin-13(65-77) | |
| (Hydrogen}[PE]RP[hArg]LFKKPP[Nle] | [PE65; hArg68; Phe70; Lys71; Pro73; Nle75; 1- | 616 |
| [1-Nal]F{FreeAcid} | Nal76]Apelin-13(65-77) | |
| {Hydrogen}[PE]RPR[Chg]SHKPP[Nle] | [PE65; Chg69; Pro73; Nle75; 1-Nal76]Apelin- | 617 |
| [1-Nal]F{FreeAcid} | 13(65-77) | |
| {Hydrogen}[PE]RPR[Chg]FHKPP[Nle] | [PE65; Chg69; Phe70; Pro73; Nle75; 1- | 618 |
| [1-Nal]F{FreeAcid} | Nal76]Apelin-13(65-77) | |
| {Hydrogen}[PE]RPR[Chg]FHKGP[Nle] | [PE65; Chg69; Phe70; Nle75; 1-Nal76]Apelin- | 619 |
| [1-Nal]F{FreeAcid} | 13(65-77) | |
| {Hydrogen}[PE]RPR[Chg]FKKPP[Nle] | [PE65; Chg69; Phe70; Lys71; Pro73; Nle75; 1- | 620 |
| [1-Nal]F{FreeAcid} | Nal76]Apelin-13(65-77) | |
| {Hydrogen}[PE]RPR[Chg]FKKPP[Nle] | [PE65; Chg69; Phe70; Lys71; Pro73; | 621 |
| PF{FreeAcid} | Nle75]Apelin-13(65-77) | |
| {Hydrogen}[PE]RPR[Cha]FHKPPM[1- | [PE65; Cha69; Phe70; Pro73; 1-Nal76]Apelin- | 622 |
| Nal]F{FreeAcid} | 13(65-77) | |
| {Hydrogen}[PE]RPR[Cha]FHKGPM[1- | [PE65; Cha69; Phe70; 1-Nal76]Apelin-13(65- | 623 |
| Nal]F{FreeAcid} | 77) | |
| {Hydrogen}[PE]RPR[Cha]FKKPPM[1- | [PE65; Cha69; Phe70; Lys71; Pro73; 1- | 624 |
| Nal]F{FreeAcid} | Nal76]Apelin-13(65-77) | |
| {Hydrogen}[PE]RPR[Cha]FKKPPMPF{FreeAcid} | [PE65; Cha69; Phe70; Lys71; Pro73]Apelin- | 625 |
| | 13(65-77) | |
| {Hydrogen}[PE]RP[hArg][Cha]FHKPPMPF{FreeAcid} | [PE65; hArg68; Cha69; Phe70; Pro73]Apelin- | 626 |
| | 13(65-77) | |
| {Hydrogen}[PE]RP[hArg][Cha]SHKPPM | [PE65; hArg68; Cha69; Pro73; 1- | 627 |
| [1-Nal]F{FreeAcid} | Nal76]Apelin-13(65-77) | |
| {Hydrogen}[PE]RP[hArg][Cha]FHKPPM | [PE65; hArg68; Cha69; Phe70; Pro73; 1- | 628 |
| [1-Nal]F{FreeAcid} | Nal76]Apelin-13(65-77) | |
| {Hydrogen}[PE]RP[hArg][Cha]FHKGPM | [PE65; hArg68; Cha69; Phe70; 1- | 629 |
| [1-Nal]F{FreeAcid} | Nal76]Apelin-13(65-77) | |
| {Hydrogen}[PE]RP[hArg][Cha]FKKPPM | [PE65; hArg68; Cha69; Phe70; Lys71; Pro73; 1- | 630 |
| [1-Nal]F{FreeAcid} | Nal76]Apelin-13(65-77) | |
| {Hydrogen}[PE]RP[hArg][Cha]FKKPPMPF{FreeAcid} | [PE65; hArg68; Cha69; Phe70; Lys71; | 631 |
| | Pro73]Apelin-13(65-77) | |
| {Hydrogen}[PE]RP[hArg]LFKKPPM[1- | [PE65; hArg68; Phe70; Lys71; Pro73; 1 - | 632 |
| Nal]F{FreeAcid} | Nal76]Apelin-13(65-77) | |
| {Hydrogen}[PE]RP[hArg]LFKKPPMPF{FreeAcid} | [PE65; hArg68; Phe70; Lys71; Pro73]Apelin- | 633 |
| | 13(65-77) | |
| {Hydrogen}[PE]RPRLFKKPPM[1- | [PE65; Phe70; Lys71; Pro73; 1-Nal76]Apelin- | 634 |
| Nal]F{FreeAcid} | 13(65-77) | |
| {Hydrogen}[PE]RPR[Chg]FHKPPM[1- | [PE65; Chg69; Phe70; Pro73; 1-Nal76]Apelin- | 635 |
| Nal]F{FreeAcid} | 13(65-77) | |
| {Hydrogen}[PE]RPR[Chg]FHKG, PM[1- | [PE65; Chg69; Phe70; 1-Nal76]Apelin-13(65- | 636 |
| Nal]F{FreeAcid} | 77) | |
| {Hydrogen}[PE]RPR[Chg]FKKPPM[1- | [PE65; Chg69; Phe70; Lys71; Pro73; 1- | 637 |
| Nal]F{FreeAcid} | Nal76]Apelin-13(65-77) | |
| {Hydrogen}[PE]RPR[Chg]FKKPPMPF{FreeAcid} | [PE65; Chg69; Phe70; Lys71; Pro73]Apelin- | 638 |
| | 13(65-77) | |
| {Hydrogen}[PE]RPRLFK[1-Nal]PPM[1- | [PE65; Phe70; Lys71; 1- | 639 |
| Nal]F{FreeAcid} | Nal72, 76; Pro73]Apelin-13(65-77) | |
| {Hydrogen}[PE]RPR[NMeLeu]FHKPPM[1- | [PE65; NMeLeu69; Phe70; Pro73; 1- | 640 |
| Nal]F{FreeAcid} | Nal76]Apelin-13(65-77) | |
| {Hydrogen}[PE]RPR[NMeLeu]FHKGPM | [PE65; NMeLeu69; Phe70; 1-Nal76]Apelin- | 641 |
| [1-Nal]F{FreeAcid} | 13(65-77) | |
| {Hydrogen}[PE]RPR[NMeLeu]FKKPPM | [PE65; NMeLeu69; Phe70; Lys71; Pro73; 1- | 642 |
| [1-Nal]F{FreeAcid} | Nal76]Apelin-13(65-77) | |
| {Hydrogen}[PE]RPR[NMeLeu]FKKPPMPF{FreeAcid} | [PE65; NMeLeu69; Phe70; Lys71; Pro73]Apelin- | 643 |
| | 13(65-77) | |
| {Hydrogen}[PE]RPR[Cha]SHKPPF[1- | [PE65; Cha69; Pro73; Phe75; 1-Nal76]Apelin- | 644 |
| Nal]F{FreeAcid} | 13(65-77) | |
| {Hydrogen}[PE]RPRLFKKPPMPF{FreeAcid} | [PE65; Phe70; Lys71; Pro73]Apelin-13(65- | 645 |
| | 77) | |
| {Hydrogen}[PE]RPR[Cha]FHKPPF[1- | [PE65; Cha69; Phe70, 75; Pro73; 1- | 646 |
| Nal]F{FreeAcid} | Nal76]Apelin-13(65-77) | |
| {Hydrogen}[PE]RPR[Cha]FHKGPF[1- | [PE65; Cha69; Phe70, 75; 1-Nal76]Apelin- | 647 |
| Nal]F{FreeAcid} | 13(65-77) | |
| {Hydrogen}[PE]RPR[Cha]FKKPPF[1- | [PE65; Cha69; Phe70, 75; Lys71; Pro73; 1- | 648 |
| Nal]F{FreeAcid} | Nal76] Apelin-13(65-77) | |
| {Hydrogen}[PE]RPR[Cha]FKKPPFPF{FreeAcid} | [PE65; Cha69; Phe70, 75; Lys71; Pro73]Apelin- | 649 |
| | 13(65-77) | |
| {Hydrogen}[PE]RP[hArg][Cha]SHKPPFPF{FreeAcid} | [PE65; hArg68; Cha69; Pro73; Phe75]Apelin- | 650 |
| | 13(65-77) | |
| {Hydrogen}[PE]RP[hArg][Cha]FHKPPFPF{FreeAcid} | [PE65; hArg68; Cha69; Phe70, 75; Pro73]Apelin- | 651 |
| | 13(65-77) | |
| {Hydrogen}[PE]RP[hArg][Cha]SHKPPF | [PE65; hArg68; Cha69; Pro73; Phe75; 1- | 652 |
| [1-Nal]F{FreeAcid} | Nal76]Apelin-13(65-77) | |
| {Hydrogen}[PE]RP[hArg][Cha]FHKPPF | [PE65; hArg68; Cha69; Phe70, 75; Pro73; 1- | 653 |
| [1-Nal]F{FreeAcid} | Nal76]Apelin-13(65-77) | |
| {Hydrogen}[PE]RP[hArg][Cha]FHKGPF | [PE65; hArg68; Cha69; Phe70, 75; 1- | 654 |
| [1-Nal]F{FreeAcid} | Nal76]Apelin-13(65-77) | |
| {Hydrogen}[PE]RP[hArg][Cha]FKKPPF | [PE65; hArg68; Cha69; Phe70, 75; Lys71; Pro73; | 655 |
| [1-Nal]F{FreeAcid} | 1-Nal76]Apelin-13(65-77) | |
| {Hydrogen}[PE]RP[hArg][Cha]FKKPPFPF{FreeAcid} | [PE65; hArg68; Cha69; Phe70, 75; Lys71; | 656 |
| | Pro73]Apelin-13(65-77) | |
| {Hydrogen}[PE]RP[hArg]LFHKPPFPF{FreeAcid} | [PE65; hArg68; Phe70, 75; Pro73]Apelin- | 657 |
| | 13(65-77) | |
| {Hydrogen}[PE]RPR[NMeLeu]FKKPP | [PE65; NMeLeu69; Phe70; Lys71; Pro73; | 658 |
| [Nle]PF{FreeAcid} | Nle75]Apelin-13(65-77) | |
| {Hydrogen}[PE]RPRLFHKPP[pI- | [PE65; Phe70; Pro73; pI-Phe75]Apelin-13(65- | 659 |
| Phe]PF{FreeAcid} | 77) | |
| {Hydrogen}[PE]RPRLFHKPP[pI-Phe][1- | [PE65; Phe70; Pro73; pI-Phe75; 1- | 660 |
| Nal]F{FreeAcid} | Nal76]Apelin-13(65-77) | |
| {Hydrogen}[PE]RP[hArg]LFHKPP[pI- | [PE65; hArg68; Phe70; Pro73; pI- | 661 |
| Phe]PF{FreeAcid} | Phe75]Apelin-13(65-77) | |
| {Hydrogen}[PE]RP[hArg]LSHKPP[pI- | [PE65; hArg68; Pro73; pI-Phe75; 1- | 662 |
| Phe][1-Nal]F{FreeAcid} | Nal76]Apelin-13(65-77) | |
| {Hydrogen}[PE]RP[hArg]LFHKPP[pI- | [PE65; hArg68; Phe70; Pro73; pI-Phe75; 1- | 663 |
| Phe][1-Nal]F{FreeAcid} | Nal76]Apelin-13(65-77) | |
| {Hydrogen}[PE]RPR[NMeLeu]FHKPP | [PE65; NMeLeu69; Phe70; Pro73; Nle75]Apelin- | 664 |
| [Nle]PF{FreeAcid} | 13(65-77) | |
| {Hydrogen}[PE]RPR[NMeLeu]SHKPP | [PE65; NMeLeu69; Pro73; Nle75; 1- | 665 |
| [Nle][1-Nal]F{FreeAcid} | Nal76]Apelin-13(65-77) | |
| {Hydrogen}[PE]RPR[NMeLeu]SH[1- | [PE65; NMeLeu69; 1- | 666 |
| Nal]PP[Nle]MF{FreeAcid} | Nal72; Pro73; Nle75; Met76]Apelin-13(65- | |
| | 77) | |
| {Hydrogen}[PE]RPR[NMeLeu]FHKPP | [PE65; NMeLeu69; Phe70; Pro73; Nle75; 1- | 667 |
| [Nle][1-Nal]F{FreeAcid} | Nal76]Apelin-13(65-77) | |
| {Hydrogen}[PE]RPR[NMeLeu]FHKGP | [PE65; NMeLeu69; Phe70; Nle75; 1- | 668 |
| [Nle][1-Nal]F{FreeAcid} | Nal76]Apelin-13(65-77) | |
| {Hydrogen}[PE]RPR[Cha]FKKPP[pI- | [PE65; Cha69; Phe70; Lys71; Pro73; pI- | 669 |
| Phe]PF{FreeAcid} | Phe75]Apelin-13(65-77) | |
| {Hydrogen}[PE]RP[hArg][Cha]SHKPP | [PE65; hArg68; Cha69; Pro73; pI- | 670 |
| [pI-Phe]PF{FreeAcid} | Phe75]Apelin-13(65-77) | |
| (Hydrogen}[PE]RP[hArg][Cha]FHKPP | [PE65; hArg68; Cha69; Phe70; Pro73; pI- | 671 |
| [pI-Phe]PF{FreeAcid} | Phe75]Apelin-13(65-77) | |
| {Hydrogen}[PE]RP[hArg][NMeLeu]SHKGP | [PE65; hArg68; NMeLeu69; pI-Phe75; | 672 |
| [pI-Phe]P[4-F—F]{FreeAcid} | 4-F—F77]Apelin-13(65-77) | |
| (Hydrogen}[PE]RP[hArg][Cha]SHKGP | [PE65; hArg68; Cha69; pI-Phe75; | 673 |
| [pI-Phe]P[4-F—F]{FreeAcid} | 4-F—F77]Apelin-13(65-77) | |
| (Hydrogen}[PE]RP[hArg][Cha]SHKGP | [PE65; hArg68; Cha69; Nle75; | 674 |
| [Nle][4-F—F]{FreeAcid} | 4-F—F76]Apelin-13(65-76) | |
| {Hydrogen}[PE]RP[hArg][NMeLeu]SHKGP | [PE65; hArg68; NMeLeu69; pI-Phe75; | 675 |
| [pI-Phe]P[4-Me—F]{FreeAcid} | 4-Me—F77]Apelin-13(65-77) | |
| {Hydrogen}[PE]RP[hArg][Cha]SHKGP | [PE65; hArg68; Cha69; pI-Phe75; | 676 |
| [pI-Phe]P[4-Me—F]{FreeAcid} | 4-Me—F77]Apelin-13(65-77) | |
| {Hydrogen}[PE]RP[hArg][Cha]SHKGP | [PE65; hArg68; Cha69; Nle75; | 677 |
| [Nle]P[4-Me—F]{FreeAcid} | 4-Me—F77]Apelin-13(65-77) | |
| {Hydrogen}[PE]RP[hArg][Cha]SHKGP | [PE65; hArg68; Cha69; Nle75; | 678 |
| [Nle][4-Me—F]{FreeAcid} | 4-Me—F76]Apelin-13(65-76) | |
| {Hydrogen}[PE]RP[hArg][Cha]SHKGP | [PE65; hArg68; Cha69; Nle75; D- | 679 |
| [Nle]P[D-Bip]{FreeAcid} | Bip77]Apelin-13(65-77) | |
| {Hydrogen}[PE]RP[hArg][Cha]SHKGP | [PE65; hArg68; Cha69; Nle75; D- | 680 |
| [Nle][D-Bip]{FreeAcid} | Bip76]Apelin-13(65-76) | |
| {Hydrogen}[PE]RP[hArg][NMeLeu]SHKGP | [PE65; hArg68; NMeLeu69; Nle75; D- | 681 |
| [Nle]P[D-1Nal]{FreeAcid} | 1Nal77]Apelin-13(65-77) | |
| {Hydrogen}[PE]RP[hArg][NMeLeu]SHKGP | [PE65; hArg68; NMeLeu69; pI-Phe75; D- | 682 |
| [pI-Phe]P[D-1Nal]{FreeAcid} | 1Nal77]Apelin-13(65-77) | |
| {Hydrogen}[PE]RP[hArg][Cha]SHKGP | [PE65; hArg68; Cha69; pI-Phe75; D- | 683 |
| [pI-Phe]P[D-1Nal]{FreeAcid} | 1Nal77]Apelin-13(65-77) | |
| {Hydrogen}[PE]RP[hArg][Cha]SHKGP | [PE65; hArg68; Cha69; Nle75; D- | 684 |
| [Nle]P[D-1Nal]{FreeAcid} | 1Nal77]Apelin-13(65-77) | |
| (Hydrogen}[PE]RP[hArg][Cha]FHKPP | [PE65; hArg68; Cha69; Phe70; Pro73; pI- | 685 |
| [pI-Phe][1-Nal]F{FreeAcid} | Phe75; 1-Nal76]Apelin-13(65-77) | |
| (Hydrogen}[PE]RP[hArg][Cha]SHKGP | [PE65; hArg68; Cha69; pI-Phe75, 77]Apelin- | 686 |
| [pI-Phe]P[pI-Phe]{FreeAcid} | 13(65-77) | |
| (Hydrogen}[PE]RP[hArg][Cha]FHKGP | [PE65; hArg68; Cha69; Phe70; pI-Phe75; 1- | 687 |
| [pI-Phe][1-Nal]F{FreeAcid} | Nal76]Apelin-13(65-77) | |
| {Hydrogen}[PE]RPR[Cha]SHKGP[pI- | [PE65; Cha69; pI-Phe75; Tyr77]Apelin- | 688 |
| Phe]PY{FreeAcid} | 13(65-77) | |
| {Hydrogen}[PE]RP[hArg][Cha]SHKGP | [PE65; hArg68; Cha69; pI- | 689 |
| [pI-Phe]PY{FreeAcid} | Phe75; Tyr77]Apelin-13(65-77) | |
| {Hydrogen}[PE]RP[hArg][Cha]SHKGP | [PE65; hArg68; Cha69; Nle75; D- | 690 |
| [Nle]y{FreeAcid} | Tyr76]Apelin-13(65-76) | |
| {Hydrogen}[PE]RPRLSHKGPMPy{FreeAcid} | [PE65; D-Tyr77]Apelin-13(65-77) | 691 |
| {Hydrogen}[PE]RP[hArg][Cha]FKKPP | [PE65; hArg68; Cha69; Phe70; Lys71; Pro73; | 692 |
| [pI-Phe][1-Nal]F{FreeAcid} | pI-Phe75; 1-Nal76]Apelin-13(65-77) | |
| {Hydrogen}[PE]RPR[Cha]SHKPP[pI- | [PE65; Cha69; Pro73; pI-Phe75]Apelin- | 693 |
| Phe]PF{FreeAcid} | 13(65-77) | |
| {Hydrogen}[PE]RP[hArg][Cha]FKKPP | [PE65; hArg68; Cha69; Phe70; Lys71; Pro73; | 694 |
| [pI-Phe]PF{FreeAcid} | pI-Phe75]Apelin-13(65-77) | |
| {Hydrogen}[PE]RP[hArg]LFHKGP[pI- | [PE65; hArg68; Phe70; pI-Phe75; 1- | 695 |
| Phe][1-Nal]F{FreeAcid} | Nal76]Apelin-13(65-77) | |
| {Hydrogen}[PE]RP[hArg]LFKKPP[pI- | [PE65; hArg68; Phe70; Lys71; Pro73; pI- | 696 |
| Phe][1-Nal]F{FreeAcid} | Phe75; 1-Nal76]Apelin-13(65-77) | |
| {Hydrogen}[PE]RP[hArg]LFKKPP[pI- | [PE65; hArg68; Phe70; Lys71; Pro73; pI- | 697 |
| Phe]PF{FreeAcid} | Phe75]Apelin-13(65-77) | |
| {Hydrogen}[PE]RPR[Chg]FHKPP[pI- | [PE65; Chg69; Phe70; Pro73; pI- | 698 |
| Phe]PF{FreeAcid} | Phe75]Apelin-13(65-77) | |
| {Hydrogen}[PE]RPR[Cha]FHKPP[pI- | [PE65; Cha69; Phe70; Pro73; pI- | 699 |
| Phe]PF{FreeAcid} | Phe75]Apelin-13(65-77) | |
| {Hydrogen}[PE]RPR[Chg]FHKPP[pI- | [PE65; Chg69; Phe70; Pro73; pI-Phe75; 1- | 700 |
| Phe][1-Nal]F{FreeAcid} | Nal76]Apelin-13(65-77) | |
| {Hydrogen}[PE]RPR[Chg]FKKPP[pI- | [PE65; Chg69; Phe70; Lys71; Pro73; pI- | 701 |
| Phe][1-Nal]F{FreeAcid} | Phe75; 1-Nal76]Apelin-13(65-77) | |
| {Hydrogen}[PE]RPR[NMeLeu]FHKPP | [PE65; NMeLeu69; Phe70; Pro73; pI- | 702 |
| [pI-Phe]PF{FreeAcid} | Phe75]Apelin-13(65-77) | |
| {Hydrogen}[PE]RPR[NMeLeu]SHKPP | [PE65; NMeLeu69; Pro73; pI-Phe75; 1- | 703 |
| [pI-Phe][1-Nal]F{FreeAcid} | Nal76]Apelin-13(65-77) | |
| {Hydrogen}[PE]RPR[Cha]SHKPP[pI- | [PE65; Cha69; Pro73; pI-Phe75; 1- | 704 |
| Phe][1-Nal]F{FreeAcid} | Nal76]Apelin-13(65-77) | |
| {Hydrogen}[PE]RPR[NMeLeu]FHKPP | [PE65; NMeLeu69; Phe70; Pro73; pI-Phe75; 1- | 705 |
| [pI-Phe][1-Nal]F{FreeAcid} | Nal76]Apelin-13(65-77) | |
| {Hydrogen}[PE]RPR[NMeLeu]FHKGP | [PE65; NMeLeu69; Phe70; pI-Phe75; 1- | 706 |
| [pI-Phe][1-Nal]F{FreeAcid} | Nal76]Apelin-13(65-77) | |
| {Hydrogen}[PE]RPR[NMeLeu]FKKPP | [PE65; NMeLeu69; Phe70; Lys71; Pro73; pI- | 707 |
| [pI-Phe][1-Nal]F{FreeAcid} | Phe75; 1-Nal76]Apelin-13(65-77) | |
| {Hydrogen}[PE]RPR[NMeLeu]FKKPP | [PE65; NMeLeu69; Phe70; Lys71; Pro73; pI- | 708 |
| [pI-Phe]PF{FreeAcid} | Phe75]Apelin-13(65-77) | |
| {Hydrogen}[PE]RPR[Cha]FHKPP[pI- | [PE65; Cha69; Phe70; Pro73; pI-Phe75; 1- | 709 |
| Phe][1-Nal]F{FreeAcid} | Nal76]Apelin-13(65-77) | |
| {Hydrogen}[PE]RPR[Cha]FKKPP[pI- | [PE65; Cha69; Phe70; Lys71; Pro73; pI- | 710 |
| Phe][1-Nal]F{FreeAcid} | Phe75; 1-Nal76]Apelin-13(65-77) | |
| {Hydrogen}[PE]RP[hArg][Cha]SHKGP | [PE65; hArg68; Cha69; Nle75; pI- | 711 |
| [Nle]P[pI-Phe]{FreeAcid} | Phe77]Apelin-13(65-77) | |
| {Hydrogen}[PE]RP[hArg][Cha]SHKGP | [PE65; hArg68; Cha69 ; pI-Phe75; D- | 712 |
| [pI-Phe]Pf{FreeAcid} | Phe77]Apelin-13(65-77) | |
| {Hydrogen}[PE]RP[hArg][Cha]SHKGP | [PE65; hArg68; Cha69; Nle75; D- | 713 |
| [Nle]Pf{FreeAcid} | Phe77]Apelin-13(65-77) | |
| {Hydrogen}[PE]RP[hArg][NMeLeu]SHKGP | [PE65; hArg68; NMeLeu69; Nle75; NMePhe7 | 714 |
| [Nle]P[NMePhe]{Amide} | 7]Apelin-13(65-77)-amide | |
| {Hydrogen}[PE]RP[hArg][NMeLeu]SHKGP | [PE65; hArg68; NMeLeu69; Nle75; D- | 715 |
| [Nle]Pw{FreeAcid} | Trp77]Apelin-13(65-77) | |
| {Hydrogen}[PE]RP [hArg][NMeLeu]SHKGP | [PE65; hArg68; NMeLeu69; pI-Phe75; D- | 716 |
| [pI-Phe]Pw{FreeAcid} | Trp77]Apelin-13(65-77) | |
| {Hydrogen}[PE]RP[hArg][Cha]SHKGP | [PE65; hArg68; Cha69; pI-Phe75; D- | 717 |
| [pI-Phe]Pw{FreeAcid} | Trp77]Apelin-13(65-77) | |
| {Hydrogen}[PE]RP[hArg][Cha]SHKGP | [PE65; hArg68; Cha69; Nle75; D- | 718 |
| [Nle]Pw{FreeAcid} | Trp77]Apelin-13(65-77) | |
| {Hydrogen}[PE]RP[hArg][Cha]SHKGP | [PE65; hArg68; Cha69; Nle75; Tyr77]Apelin- | 719 |
| [Nle]PY{FreeAcid} | 13(65-77) | |
| {Hydrogen}[PE]RP[hArg][NMeLeu]SHKGP | [PE65; hArg68; NMeLeu69; Nle75; D- | 720 |
| [Nle]Py{FreeAcid} | Tyr77]Apelin-13(65-77) | |
| {Hydrogen}[PE]RP[hArg][NMeLeu]SHKGP | [PE65; hArg68; NMeLeu69; pI-Phe75; D- | 721 |
| [pI-Phe]Py{FreeAcid} | Tyr77]Apelin-13(65-77) | |
| {Hydrogen}[PE]RP[hArg][Cha]SHKGP | [PE65; hArg68; Cha69; pI-Phe75; D- | 722 |
| [pI-Phe]Py{FreeAcid} | Tyr77]Apelin-13(65-77) | |
| {Hydrogen}[PE]RP[hArg][Cha]SHKGP | [PE65; hArg68; Cha69; Nle75; D- | 723 |
| [Nle]Py{FreeAcid} | Tyr77]Apelin-13(65-77) | |
| {Hydrogen}[PE]RP[hArg][NMeLeu]SHKPP | [PE65; hArg68; NMeLeu69; Pro73; Nle75; D- | 724 |
| [Nle]P[D-Bip]{Amide} | Bip77]Apelin-13(65-77)-amide | |
| {Hydrogen}[PE]RP[hArg][NMeLeu]FHKGP | [PE65; hArg68; NMeLeu69; Phe70; pI- | 725 |
| [pI-Phe]P[2-Nal]{FreeAcid} | Phe75; 2-Nal77]Apelin-13(65-77) | |
| {Hydrogen}[PE]RP[hArg][NMeLeu]FHKGP | [PE65; hArg68; NMeLeu69; Phe70; Nle75; D- | 726 |
| [Nle]P[D-Bip]{Amide} | Bip77]Apelin-13(65-77)-amide | |
| {Hydrogen}[PE]RP[hArg][NMeLeu]FHKGP | [PE65; hArg68; NMeLeu69; Phe70; Nle75; D- | 727 |
| [Nle]P[D-Bip]{FreeAcid} | Bip77]Apelin-13(65-77) | |
| {Hydrogen}[PE]RP[hArg][NMeLeu]FHKPP | [PE65; hArg68; NMeLeu69; Phe70; Pro73; | 728 |
| [Nle]P[D-Bip]{FreeAcid} | Nle75; D-Bip77]Apelin-13(65-77) | |
| {Hydrogen}[PE]RP[hArg][NMeLeu]FHKGP | [PE65; hArg68; NMeLeu69; Phe70; pI- | 729 |
| [pI-Phe]P[D-Bip]{FreeAcid} | Phe75; D-Bip77]Apelin-13(65-77) | |
| {Hydrogen}[PE]RP[hArg][NMeLeu]FHKPP | [PE65; hArg68; NMeLeu69; Phe70; Pro73; | 730 |
| [Nle]P[D-Bip]{Amide} | Nle75; D-Bip77]Apelin-13(65-77)-amide | |
| {Hydrogen}[PE]RP[hArg][NMeLeu]SHKPP | [PE65; hArg68; NMeLeu69; Pro73 ; pI- | 731 |
| [pI-Phe]P[D-Bip]{FreeAcid} | Phe75; D-Bip77]Apelin-13(65-77) | |
| {Palmitoyl}LRP[hArg][NMeLeu]FHKGP | Palmitoyl- | 732 |
| [Nle]P[D-Bip]{FreeAcid} | [Leu65; hArg68; NMeLeu69; Phe70; Nle75; D- | |
| | Bip77]Apelin-13(65-77) | |
| {Hydrogen}[PE]RP[hArg][Cha]SHKGP | [PE65; hArg68; Cha69; pI-Phe75; D- | 733 |
| [pI-Phe]P[D-Bip]{FreeAcid} | Bip77]Apelin-13(65-77) | |
| {Hydrogen}[PE]RP [hArg][NMeLeu]SHKGP | [PE65; hArg68; NMeLeu69; Nle75; 4- | 734 |
| [Nle]P[4-Me—F]{FreeAcid} | Me—F77]Apelin-13(65-77) | |
| {Hydrogen}[PE]RP[hArg][NMeLeu]FHKGP | [PE65; hArg68; NMeLeu69; Phe70; pI- | 735 |
| [pI-Phe]P[D-Bip]{Amide} | Phe75; D-Bip77]Apelin-13(65-77)-amide | |
| {Hydrogen}[PE]RP[hArg][Cha]SHKGP | [PE65; hArg68; Cha69; Nle75; D- | 736 |
| [Nle]Pf{Amide} | Phe77]Apelin-13(65-77)-amide | |
| {Hydrogen}[PE]RP[hArg][NMeLeu]SHKGP | [PE65; hArg68; NMeLeu69; Nle75; 4- | 737 |
| [Nle]P[4-Cl—F]{Amide} | Cl—F77]Apelin-13(65-77)-amide | |
| {Hydrogen}[PE]RP[hArg][NMeLeu]SHKGP | [PE65; hArg68; NMeLeu69; Nle75; 4- | 738 |
| [Nle]P[4-Me—F]{Amide} | Me—F77]Apelin-13(65-77)-amide | |
| {Hydrogen}[PE]RP[hArg][NMeLeu]SHKGP | [PE65; hArg68; NMeLeu69; Nle75; | 739 |
| [Nle]P[Bip]{Amide} | Bip77]Apelin-13(65-77)-amide | |
| {Hydrogen}[PE]RP[hArg][NMeLeu]SHKGP | [PE65; hArg68; NMeLeu69; Nle75; D- | 740 |
| [Nle]P[D-Bip]{Amide} | Bip77]Apelin-13(65-77)-amide | |
| {Hydrogen}[PE]RP [hArg][NMeLeu]SHKGP | [PE65; hArg68; NMeLeu69; Nle75; 4- | 741 |
| [Nle]P[4-NO2—F]{Amide} | NO2—F77]Apelin-13(65-77)-amide | |
| {Hydrogen}[PE]RP[hArg][NMeLeu]SHKG | [PE65; hArg68; NMeLeu69; 1- | 742 |
| [1-Nal][Nle]P[4-Cl—F]{Amide} | Nal74; Nle75; 4-Cl—F77]Apelin-13(65-77)- | |
| | amide | |
| {Hydrogen}[PE]RP[hArg][NMeLeu]FHKG | [PE65; hArg68; NMeLeu69; Phe70; 1- | 743 |
| [1-Nal][Nle]P[4-Cl—F]{Amide} | Nal74; Nle75; 4-Cl—F77]Apelin-13(65-77)- | |
| | amide | |
| {Hydrogen}[PE]RP[hArg][NMeLeu]FHKGP | [PE65; hArg68; NMeLeu69; Phe70; Nle75; 4- | 744 |
| [Nle]P[4-Cl—F]{Amide} | Cl—F77]Apelin-13(65-77)-amide | |
| {Hydrogen}[PE]RP[hArg][NMeLeu]SAKG | [PE65; hArg68; NMeLeu69; Ala71; 1- | 745 |
| [1-Nal][Nle]P[4-Cl—F]{Amide} | Nal74; Nle75; 4-Cl—F77]Apelin-13(65-77)- | |
| | amide | |
| {Hydrogen}[PE]RP[hArg][NMeLeu]FAKG | [PE65; hArg68; NMeLeu69; Phe70; Ala71; 1- | 746 |
| [1-Nal][Nle]P[4-Cl—F]{Amide} | Nal74; Nle75; 4-Cl—F77]Apelin-13(65-77)- | |
| | amide | |
| {Hydrogen}[PE]RP[hArg][NMeLeu]FAKGP | [PE65; hArg68; NMeLeu69; Phe70748; Ala71; | 747 |
| [Nle]P[4-Cl—F]{Amide} | Nle75; 4-Cl—F77]Apelin-13(65-77)-amide | |
| {Hydrogen}[PE]RP[hArg][NMeLeu]S[1- | [PE65; hArg68; NMeLeu69; 1- | 748 |
| Nal]KG[1-Nal][Nle]P[4-Cl—F]{Amide} | Nal71, 74; Nle75; 4-Cl—F77]Apelin-13(65- | |
| | 77)-amide | |
| {Hydrogen}[PE]RP[hArg][NMeLeu]F[1- | [PE65; hArg68; NMeLeu69; Phe70; 1- | 749 |
| Nal]KG[1-Nal][Nle]P[4-Cl—F]{Amide} | Nal71, 74; Nle75; 4-Cl—F77]Apelin-13(65- | |
| | 77)-amide | |
| {Hydrogen}[PE]RP[hArg][NMeLeu]F[1- | [PE65; hArg68; NMeLeu69; Phe70; 1- | 750 |
| Nal][1-Nal]G[1-Nal][Nle]P[4-Cl—F]{Amide} | Nal71, 72, 74; Nle75; 4-Cl—F77]Apelin-13(65- | |
| | 77)-amide | |
| {Hydrogen}[PE]RP[hArg][NMeLeu]F[1- | [PE65; hArg68; NMeLeu69; Phe70; 1- | 751 |
| Nal]KGP[Nle]P[4-Cl—F]{Amide} | Nal71; Nle75; 4-Cl—F77]Apelin-13(65-77)- | |
| | amide | |
| {Hydrogen}[PE]RP[hArg][NMeLeu]F[1- | [PE65; hArg68; NMeLeu69; Phe70; 1- | 752 |
| Nal]KGP[Nle]P[4-Cl—F]{Amide} | Nal71; Nle75; 4-Cl—F77]Apelin-13(65-77)- | |
| | amide | |
| {Hydrogen}[PE]RP[hArg][NMeLeu][NMePhe] | [PE65; hArg68; NMeLeu69; NMePhe70; 1- | 753 |
| [1-Nal][1-Nal]G[1-Nal][Nle]P[4-Cl—F]{Amide} | Nal71, 72, 74; Nle75; 4-Cl—F77]Apelin-13(65- | |
| | 77)-amide | |
| {Hydrogen}[PE]RP[hArg][NMeLeu][NMePhe] | [PE65; hArg68; NMeLeu69; NMePhe70; 1- | 754 |
| [1-Nal]KGP[Nle]P[4-Cl—F]{Amide} | Nal71; Nle75; 4-Cl—F77]Apelin-13(65-77)- | |
| | amide | |
| {Hydrogen}[PE]RP[hArg][NMeLeu][NMePhe] | [PE65; hArg68; NMeLeu69; NMePhe70; Ala71; | 755 |
| AKG[1-Nal][Nle]P[4-Cl—F]{Amide} | 1-Nal74; Nle75; 4-Cl—F77]Apelin-13(65- | |
| | 77)-amide | |
| {Hydrogen}[PE]RP[hArg][NMeLeu][NMePhe] | [PE65; hArg68; NMeLeu69; NMePhe70; Ala71; | 756 |
| AKG[1-Nal][Nle]P[4-Cl—F]{Amide} | 1-Nal74; Nle75; 4-Cl—F77]Apelin-13(65- | |
| | 77)-amide | |
| {Hydrogen}[PE]RP[hArg][NMeLeu]S[2- | [PE65; hArg68; NMeLeu69; 2-Nal71; 1- | 757 |
| Nal]KG[1-Nal][Nle]P[4-Cl—F]{Amide} | Nal74; Nle75; 4-Cl—F77]Apelin-13(65-77)- | |
| | amide | |
| {Hydrogen}[PE]RP[hArg][NMeLeu]F[2- | [PE65; hArg68; NMeLeu69; Phe70; 2- | 758 |
| Nal]KG[1-Nal][Nle]P[4-Cl—F]{Amide} | Nal71; 1-Nal74; Nle75; 4-Cl—F77]Apelin- | |
| | 13(65-77)-amide | |
| {Hydrogen}[PE]RP[hArg][NMeLeu]F[2- | [PE65; hArg68; NMeLeu69; Phe70; 2- | 759 |
| Nal][1-Nal]G[1-Nal][Nle]P[4-Cl—F]{Amide} | Nal71; 1-Nal72,74; Nle75; 4-Cl—F77]Apelin- | |
| | 13(65-77)-amide | |
| {Hydrogen}[PE]RP[hArg][NMeLeu]F[2- | [PE65; hArg68; NMeLeu69; Phe70; 2- | 760 |
| Nal]KGP[Nle]P[4-Cl—F]{Amide} | Nal71; Nle75; 4-Cl—F77]Apelin-13(65-77)- | |
| | amide | |
| {Hydrogen}[PE]RP[hArg][NMeLeu][NMePhe] | [PE65; hArg68; NMeLeu69; NMePhe70; 2- | 761 |
| [2-Nal]KGP[Nle]P[4-Cl—F]{Amide} | Nal71; Nle75; 4-Cl—F77]Apelin-13(65-77)- | |
| | amide | |
| {Hydrogen}[PE]RP[hArg][NMeLeu]FHKPP | [PE65; hArg68; NMeLeu69; Phe70; Pro73; | 762 |
| [Nle]PF | Nle75]Apelin-13(65-77) | |
| {Hydrogen}[PE]RP[hArg][NMeLeu]FHK | [PE65; hArg68; NMeLeu69; Phe70; Thz73; | 763 |
| [Thz]P[Nle]PF | Nle75]Apelin-13(65-77) | |
| Palmitoyl- | Palmitoyl- | 764 |
| RP[hArg][NMeLeu]FHKPP[Nle]PF | [hArg68; NMeLeu69; Phe70; Pro73; | |
| | Nle75]Apelin-13(65-77) | |
| {Hydrogen}[PE]RP[hArg][NMeLeu]FHKPP | [PE65; hArg68; NMeLeu69; Phe70; Pro73; | 765 |
| [Nle]PFK(palmitoyl){Amide} | Nle75; K(palmitoyl)78]Apelin-13(65-77) | |
| Palmitoyl- | Palmitoyl- | 766 |
| RP[hArg][NMeLeu]FHKPP[Nle]PF{Amide} | [hArg68; NMeLeu69; Phe70; Pro73; | |
| | Nle75]Apelin-13(65-77)-amide | |
| {Hydrogen}[PE]RP[hArg][NMeLeu]SHKGP | [PE65; hArg68; NMeLeu69; Nle75; D- | 767 |
| [Nle]P[D-Bip] | Bip77]Apelin-13(65-77) | |
| {Hydrogen}[PE]RP[hArg][NMeLeu]SHKGP | [PE65; hArg68; NMeLeu69; pI-Phe75; D- | 768 |
| [pI-Phe]P[D-Bip] | Bip77]Apelin-13(65-77) | |
| {Hydrogen}[PE]RP[hArg][NMeLeu]SHKGP | [PE65; hArg68; NMeLeu69; pI-Phe75; 2- | 769 |
| [pI-Phe]P[2-Nal] | Nal77]Apelin-13(65-77) | |
| Palmitoyl- | Palmitoyl-Leu65; hArg68; NMeLeu69; pI- | 770 |
| LRP[hArg][NMeLeu]SHKGP[pI- | Phe75; D-Bip77]Apelin-13(65-77) | |
| Phe]P[D-Bip] | | |
| {Hydrogen}[PE]RP[hArg][Cha]SHKGP | PE65; hArg68; Cha69; Nle75; 4-Cl—F77; | 771 |
| [Nle][4-Cl—F]K(palmitoyl){Amide} | K(Palmitoyl)78]Apelin-13(65-78)- | |
| | amide | |
| {Hydrogen}[PE]RP[hArg][NMeLeu]SHKGP | PE65; hArg68; NMeLeu69; Nle75; D- | 772 |
| [Nle]P[D-Bip]K(palmitoyl){Amide} | Bip77; K(Palmitoyl)78]Apelin-13(65-78)- | |
| | amide | |
| {Hydrogen}[PE]RP[hArg][Cha]SHKGP | PE65; hArg68; Cha69; Nle75; D- | 773 |
| [Nle][D-1Nal]K(palmitoyl){Amide} | 1Nal77; K(Palmitoyl)78]Apelin-13(65-78)- | |
| | amide | |
| {Hydrogen}[PE]RP [hArg][NMeLeu]SHKGP | [PE65; hArg68; NMeLeu69; Nle75; 2- | 774 |
| [Nle]P[2-Nal]{Amide} | Nal77]Apelin-13(65-77) | |
| {Hydrogen}[PE]RP[hArg][NMeLeu]SHKGP | [PE65; hArg68; NMeLeu69; pI-Phe75; 4- | 775 |
| [pI-Phe]P[4-Cl—F] | Cl—F77]Apelin-13(65-77) | |
| {Hydrogen}[PE]RP [hArg][NMeLeu]SHKGP | [PE65; hArg68; NMeLeu69; Nle75; 4- | 776 |
| [Nle]P[4-Cl—F] | Cl—F77]Apelin-13(65-77) | |
| {Hydrogen}[PE]RP [hArg][NMeLeu]SHKGP | [PE65; hArg68; NMeLeu69; Nle75; 4- | 777 |
| [Nle]P[4-F—F] | F—F77]Apelin-13(65-77) | |
| {Hydrogen}[PE]RP[hArg][Cha]SHKGP | [PE65; hArg68; Cha69; Nle75; 4- | 778 |
| [Nle]P[4-F—F] | F—F77]Apelin-13(65-77) | |
| {Hydrogen}[PE]RP[hArg][NMeLeu]SHKGP | [PE65; hArg68; NMeLeu69; Nle75; pI- | 779 |
| [Nle]P[pI-Phe] | Phe77]Apelin-13(65-77) | |
| {Hydrogen}[PE]RPR[NMeLeu]FKKPPF | [PE65; NMeLeu69; Phe70, 75; Lys71; Pro73; 1- | 780 |
| [1-Nal]F | Nal76]Apelin-13(65-77) | |
| {Hydrogen}[PE]RPR[NMeLeu]FHKGP | [PE65; NMeLeu69; Phe70; Nle75]Apelin- | 781 |
| [Nle]PF | 13(65-77) | |
| {Hydrogen}[PE]RP [hArg][NMeLeu]SHKGP | [PE65; hArg68; NMeLeu69; Nle75; D- | 782 |
| [Nle]Pf | Phe77]Apelin-13(65-77) | |
| {Hydrogen}[PE]RP[hArg][NMeLeu]FHKPP | [PE65; hArg68; NMeLeu69; Phe70; Pro73; | 783 |
| [Nle]PF | Nle75]Apelin-13(65-77) | |
| Palmitoyl- | Palmitoyl-Leu65; hArg68; NMeLeu69; pI- | 784 |
| LRP[hArg][NMeLeu]SHKGP[pI- | Phe75; D-Bip77]Apelin-13(65-77) | |
| Phe]P[D-Bip]{Amide} | | |
| {Hydrogen}[PE]RP [hArg][NMeLeu]SHKGP | PE65; hArg68; NMeLeu69; Nle75; D- | 785 |
| [Nle]P[D-Bip]K(palmitoyl){Amide} | Bip77; K(Palmitoyl)78]Apelin-13(65-78)- | |
| | amide | |
| {Hydrogen}[PE]RP[hArg][NMeLeu]FHKPP | [PE65; hArg68; NMeLeu69; Phe70; Pro73; | 786 |
| [Nle]PF | Nle75]Apelin-13(65-77) | |
| {Hydrogen}[PE]RPR[NMeLeu]FHKGP | [PE65; NMeLeu69; Phe70; Nle75]Apelin- | 787 |
| [Nle]PF | 13(65-77) | |
| {Hydrogen}[PE]RPR[NMeLeu]FHKGP | [PE65; NMeLeu69; Phe70; Nle75]Apelin- | 788 |
| [Nle]PF | 13(65-77) | |
| (Hydrogen}[PE]RP[hArg][Cha]SHKGP | [PE65; hArg68; Cha69; Nle75; 1- | 789 |
| [Nle][1-Nal] | Nal76]Apelin-13(65-76) | |
| (Hydrogen}[PE]RP[hArg][Cha]SHKGP | [PE65; hArg68; Cha69; pI-Phe75; 2- | 790 |
| [pI-Phe]P[2-Nal] | Nal77]Apelin-13(65-77) | |
| {Acetyl}[Pra]LRP[hArg][NMeLeu][Pra] | Ac-Pra- | 791 |
| H[Dpr]GP[Nle]P[4-Cl—F]{FreeAcid} | [Leu65; hArg68; NMeLeu69; Pra70; Dpr72; | |
| | Nle75; 4-Cl—F77]Apelin-13(65-77) | |
| {Acetyl}[Pra]LRP[hArg][NMeLeu][Pra] | Ac-Pra- | 792 |
| HHGP[Nle]P[4-Cl—F]{FreeAcid} | [Leu65; hArg68; NMeLeu69; Pra70; His72; | |
| | Nle75; 4-Cl—F77]Apelin-13(65-77) | |
| {Acetyl}[Pra]LRP[hArg][NMeLeu][Pra] | Ac-Pra- | 793 |
| H[2Pal]GP[Nle]P[4-Cl—F]{FreeAcid} | [Leu65; hArg68; NMeLeu69; Pra70; 2Pal72; | |
| | Nle75; 4-Cl—F77]Apelin-13(65-77) | |
| {Acetyl}[Pra]LRP[hArg][NMeLeu][Pra] | Ac-Pra- | 794 |
| H[3Pal]GP[Nle]P[4-Cl—F]{FreeAcid} | [Leu65; hArg68; NMeLeu69; Pra70; 3Pal72; | |
| | Nle75; 4-Cl—F77]Apelin-13(65-77) | |
| {Acetyl}[Pra]LRP[hArg][NMeLeu][Pra] | Ac-Pra- | 795 |
| HRGP[Nle]P[4-Cl—F]{FreeAcid} | [Leu65; hArg68; NMeLeu69; Pra70; Arg72; | |
| | Nle75; 4-Cl—F77]Apelin-13(65-77) | |
| {Acetyl}[Pra]LRP[hArg][NMeLeu][Pra] | Ac-Pra- | 796 |
| H[hArg]GP[Nle]P[4-Cl—F]{FreeAcid} | [Leu65; hArg68, 72; NMeLeu69; Pra70; Nle75; | |
| | 4-Cl—F77]Apelin-13(65-77) | |
| {Acetyl}[Pra]LRP[hArg][NMeLeu][Pra] | Ac-Pra- | 797 |
| HKPP[Nle]P[4-Cl—F]{FreeAcid} | [Leu65; hArg68; NMeLeu69; Pra70; Pro73; | |
| | Nle75; 4-Cl—F77]Apelin-13(65-77) | |
| {Acetyl}[Pra]LRP[hArg][NMeLeu][Pra] | Ac-Pra- | 798 |
| HK[Oic]P[Nle]P[4-Cl—F]{FreeAcid} | [Leu65; hArg68; NMeLeu69; Pra70; Oic73; | |
| | Nle75; 4-Cl—F77]Apelin-13(65-77) | |
| {Acetyl}[Pra]LRP[hArg][NMeLeu][Pra] | Ac-Pra- | 799 |
| HK[bAla]P[Nle]P[4-Cl—F]{FreeAcid} | [Leu65; hArg68; NMeLeu69; Pra70; bAla73; | |
| | Nle75; 4-Cl—F77]Apelin-13(65-77) | |
| {Acetyl}[Pra]LRP[hArg][NMeLeu][Pra] | Ac-Pra- | 800 |
| H[l-Nal]PP[Nle]P[4-Cl—F]{FreeAcid} | [Leu65; hArg68; NMeLeu69; Pra70; 1- | |
| | Nal72; Pro73; Nle75; 4-Cl—F77]Apelin-13(65- | |
| | 77) | |
| {Acetyl}[Pra]LRP[hArg][NMeLeu][Pra] | Ac-Pra- | 801 |
| HKGP[Nle]P[4-Cl—F]{FreeAcid} | [Leu65; hArg68; NMeLeu69; Pra70; Nle75; 4- | |
| | Cl—F77]Apelin-13(65-77) | |
| {Acetyl}[Pra]LRP[hArg][NMeLeu][Pra] | Ac-Pra- | 802 |
| H[1-Nal][Oic]P[Nle]P[4-Cl—F]{FreeAcid} | [Leu65; hArg68; NMeLeu69; Pra70; 1- | |
| | Nal72; Oic73; Nle75; 4-Cl—F77]Apelin-13(65- | |
| | 77) | |
| {Acetyl}[Pra]LRP[hArg][NMeLeu][Pra] | Ac-Pra- | 803 |
| H[1-Nal][bAla]P[Nle]P[4-Cl—F]{FreeAcid} | [Leu65; hArg68; NMeLeu69; Pra70; 1- | |
| | Nal72; bAla73; Nle75; 4-Cl—F77]Apelin- | |
| | 13(65-77) | |
| {Acetyl}[Pra]LRP[hArg][NMeLeu][Pra] | Ac-Pra- | 804 |
| HKPP[Nle]P[4-Cl—F]{FreeAcid} | [Leu65; hArg68; NMeLeu69; Pra70; Pro73; | |
| | Nle75; 4-Cl—F77]Apelin-13(65-77) | |
| {Acetyl}[Pra]LRP[hArg][NMeLeu][Pra] | Ac-Pra- | 805 |
| H[2Nal]PP[Nle]P[4-Cl—F]{FreeAcid} | [Leu65; hArg68; NMeLeu69; Pra70; 2- | |
| | Nal72; Pro73; Nle75; 4-Cl—F77]Apelin-13(65- | |
| | 77) | |
| {Acetyl}[Pra]LRP[hArg][NMeLeu][Pra] | Ac-Pra- | 806 |
| H[Bip]PP[Nle]P[4-Cl—F]{FreeAcid} | [Leu65; hArg68; NMeLeu69; Pra70; Bip72; Pro73; | |
| | Nle75; 4-Cl—F77]Apelin-13(65-77) | |
| {Acetyl}[Pra]LRP[hArg][NMeLeu][Pra] | Ac-Pra- | 807 |
| HFPP[Nle]P[4-Cl—F]{FreeAcid} | [Leu65; hArg68; NMeLeu69; Pra70; Phe72; Pro73; | |
| | Nle75; 4-Cl—F77]Apelin-13(65-77) | |
| {Acetyl}[Pra]LRP[hArg][NMeLeu][Pra] | Ac-Pra- | 808 |
| H[4AmP]PP[Nle]P[4-Cl—F]{FreeAcid} | [Leu65; hArg68; NMeLeu69; Pra70; 4AmP72; | |
| | Pro73; Nle75; 4-Cl—F77]Apelin-13(65-77) | |
| {Acetyl}[Pra]LRP[hArg][NMeLeu][Pra] | Ac-Pra- | 809 |
| H[Orn]PP[Nle]P[4-Cl—F]{FreeAcid} | [Leu65; hArg68; NMeLeu69; Pra70; Orn72; Pro73; | |
| | Nle75; 4-Cl—F77]Apelin-13(65-77) | |
| {Acetyl}[Pra]LRP[hArg][NMeLeu][Pra] | Ac-Pra- | 810 |
| H[Dab]PP[Nle]P[4-Cl—F]{FreeAcid} | [Leu65; hArg68; NMeLeu69; Pra70; Dab72; Pro73; | |
| | Nle75; 4-Cl—F77]Apelin-13(65-77) | |
| {Acetyl}[Pra]LRP[hArg][NMeLeu][Pra] | Ac-Pra- | 811 |
| H[Dpr]PP[Nle]P[4-Cl—F]{FreeAcid} | [Leu65; hArg68; NMeLeu69; Pra70; Dpr72; Pro73; | |
| | Nle75; 4-Cl—F77]Apelin-13(65-77) | |
| {Acetyl}[Pra]LRP[hArg][NMeLeu][Pra] | Ac-Pra- | 812 |
| H[l-Nal]GP[Nle]P[4-Cl—F]{FreeAcid} | [Leu65; hArg68; NMeLeu69; Pra70; 1- | |
| | Nal72; Nle75; 4-Cl—F77]Apelin-13(65-77) | |
| {Acetyl}[Pra]LRP[hArg][NMeLeu][Pra] | Ac-Pra- | 813 |
| HHPP[Nle]P[4-Cl—F]{FreeAcid} | [Leu65; hArg68; NMeLeu69; Pra70; His72; Pro73; | |
| | Nle75; 4-Cl—F77]Apelin-13(65-77) | |
| {Acetyl}[Pra]LRP[hArg][NMeLeu][Pra] | Ac-Pra- | 814 |
| H[2Pal]PP[Nle]P[4-Cl—F]{FreeAcid} | [Leu65; hArg68; NMeLeu69; Pra70; 2Pal72; Pro73; | |
| | Nle75 ; 4-Cl—F77]Apelin-13(65-77) | |
| {Acetyl}[Pra]LRP[hArg][NMeLeu][Pra] | Ac-Pra- | 815 |
| H[3Pal]PP[Nle]P[4-Cl—F]{FreeAcid} | [Leu65; hArg68; NMeLeu69; Pra70; 3Pal72; Pro73; | |
| | Nle75 ; 4-Cl—F77] Apelin-13(65-77) | |
| {Acetyl}[Pra]LRP[hArg][NMeLeu][Pra] | Ac-Pra- | 816 |
| HRPP[Nle]P[4-Cl—F]{FreeAcid} | [Leu65; hArg68; NMeLeu69; Pra70; Arg72; Pro73; | |
| | Nle75; 4-Cl—F77]Apelin-13(65-77) | |
| {Acetyl}[Pra]LRP[hArg][NMeLeu][Pra] | Ac-Pra- | 817 |
| H[hArg]PP[Nle]P[4-Cl—F]{FreeAcid} | [Leu65; hArg68, 72; NMeLeu69; Pra70; Pro73; | |
| | Nle75; 4-Cl—F77]Apelin-13(65-77) | |
| {Acetyl}[Pra]LRP[hArg][NMeLeu][Pra] | Ac-Pra- | 818 |
| HKGP[Nle]P[4-Cl—F]{FreeAcid} | [Leu65; hArg68; NMeLeu69; Pra70; Nle75; 4- | |
| | Cl—F77]Apelin-13(65-77) | |
| {Acetyl}[Pra]LRP[hArg][NMeLeu][Pra] | Ac-Pra- | 819 |
| HKG[Oic][Nle]P[4-Cl—F]{FreeAcid} | [Leu65; hArg68; NMeLeu69; Pra70; Oic74; | |
| | Nle75; 4-Cl—F77]Apelin-13(65-77) | |
| {Acetyl}[Pra]LRP[hArg][NMeLeu][Pra] | Ac-Pra- | 820 |
| HKGP[Nle][Oic][4-Cl—F]{FreeAcid} | [Leu65; hArg68; NMeLeu69; Pra70; Nle75; | |
| | Oic76; 4-Cl—F77]Apelin-13(65-77) | |
| {Acetyl}[Pra]LR[Oic][hArg][NMeLeu][Pra] | Ac-Pra- | 821 |
| HKGP[Nle]P[4-Cl—F]{FreeAcid} | [Leu65; Oic67; hArg68; NMeLeu69; Pra70; | |
| | Nle75; 4-Cl—F77]Apelin-13(65-77) | |
| {Acetyl}[Pra]LR[Oic][hArg][NMeLeu][Pra] | Ac-Pra- | 822 |
| HKG[Oic][Nle][Oic][4-Cl—F]{FreeAcid} | [Leu65; Oic67, 74, 76; hArg68; NMeLeu69; Pra70; | |
| | Nle75; 4-Cl—F77]Apelin-13(65-77) | |
| {Acetyl}[Pra]LRP[hArg][NMeLeu][Pra] | Ac-Pra- | 823 |
| H[2Nal]GP[Nle]P[4-Cl—F]{FreeAcid} | [Leu65; hArg68; NMeLeu69; Pra70; 2- | |
| | Nal72; Nle75; 4-Cl—F77]Apelin-13(65-77) | |
| {Acetyl}[Pra]LR[Oic][hArg][NMeLeu][Pra] | Ac-Pra- | 824 |
| HKGP[Nle][Oic][4-Cl—F]{FreeAcid} | [Leu65; Oic67, 76; hArg68; NMeLeu69; Pra70; | |
| | Nle75; 4-Cl—F77]Apelin-13(65-77) | |
| {Acetyl}[Pra]LR[Oic][hArg][NMeLeu][Pra] | Ac-Pra- | 825 |
| HKG[Oic][Nle]P[4-Cl—F]{FreeAcid} | [Leu65; Oic67, 74; hArg68; NMeLeu69; Pra70; | |
| | Nle75; 4-Cl—F77]Apelin-13(65-77) | |
| {Acetyl}[Pra]LRP[hArg][NMeLeu][Pra] | Ac-Pra- | 826 |
| HKG[Oic][Nle][Oic][4-Cl—F]{FreeAcid} | [Leu65; hArg68; NMeLeu69; Pra70; Oic74, 76; | |
| | Nle75; 4-Cl—F77]Apelin-13(65-77) | |
| {Acetyl}[Pra]LRP[NMeArg][NMeLeu][Pra] | Ac-Pra- | 827 |
| HKGP[Nle]P[4-Cl—F]{FreeAcid} | [Leu65; NMeArg68; NMeLeu69; Pra70; Nle75; | |
| | 4-Cl—F77]Apelin-13(65-77) | |
| {Acetyl}[Pra]L[NMeArg]P [hArg][NMeLeu] | Ac-Pra- | 828 |
| [Pra]HKGP[Nle]P[4-Cl—F]{FreeAcid} | [Leu65; NMeArg66; hArg68; NMeLeu69; Pra70; | |
| | Nle75; 4-Cl—F77]Apelin-13(65-77) | |
| {Acetyl}[Pra]L[NMeArg]P[NMeArg][NMeLeu] | Ac-Pra- | 829 |
| [Pra]HKGP[Nle]P[4-Cl—F]{FreeAcid} | [Leu65; NMeArg66, 68; NMeLeu69; Pra70; | |
| | Nle75; 4-Cl—F77]Apelin-13(65-77) | |
| {Acetyl}[Pra]LRP[hArg][NMeLeu][Pra] | Ac-Pra- | 830 |
| HKG[Oic][Nle][Tic][4-Cl—F]{FreeAcid} | [Leu65; hArg68; NMeLeu69; Pra70; Oic74; | |
| | Nle75; Tic76; 4-Cl—F77]Apelin-13(65-77) | |
| {Acetyl}[Pra]LR[Tic][hArg][NMeLeu][Pra] | Ac-Pra- | 831 |
| HKG[Oic][Nle]P[4-Cl—F]{FreeAcid} | [Leu65; Tic67; hArg68; NMeLeu69; Pra70; | |
| | Oic74; Nle75; 4-Cl—F77]Apelin-13(65-77) | |
| [PE]RP[hArg][NMeLeu][Pra]HKG[Oic] | [PE65; hArg68; NMeLeu69; Pra70; Oic74; | 832 |
| [Nle]P[4-Cl—F]{FreeAcid} | Nle75; 4-Cl—F77]Apelin-13(65-77) | |
| [PE]RP[hArg][NMeLeu][Pra]H[1- | [PE65; hArg68; NMeLeu69; Pra70; 1- | 833 |
| Nal]G[Oic][Nle]P[4-Cl—F]{FreeAcid} | Nal72; Oic74; Nle75; 4-Cl—F77]Apelin-13(65- | |
| | 77) | |
| {Acetyl}[Pra]LRP[hArg][NMeLeu][Pra] | Ac-Pra- | 834 |
| H[Bip]GP[Nle]P[4-Cl—F]{FreeAcid} | [Leu65; hArg68; NMeLeu69; Pra70; Bip72; | |
| | Nle75; 4-Cl—F77]Apelin-13(65-77) | |
| [PE]RP[hArg][NMeLeu][Pra]H[2Nal]G | [PE65 ; hArg68 ; NMeLeu69 ; Pra70; 2- | 835 |
| [Oic][Nle]P[4-Cl—F]{FreeAcid} | Nal72; Oic74; Nle75; 4-Cl—F77]Apelin-13(65- | |
| | 77) | |
| [PE]RP[hArg][NMeLeu][Pra]H[Bip]G[Oic] | [PE65; hArg68; NMeLeu69; Pra70; Bip72; Oic74; | 836 |
| [Nle]P[4-Cl—F]{FreeAcid} | Nle75; 4-Cl—F77]Apelin-13(65-77) | |
| [PE]RP [hArg][NMeLeu][Pra]HFG[Oic] | [PE65; hArg68; NMeLeu69; Pra70; Phe72; Oic74; | 837 |
| [Nle]P[4-Cl—F]{FreeAcid} | Nle75; 4-Cl—F77]Apelin-13(65-77) | |
| [PE]RP [hArg][NMeLeu][Pra]H[4AmP]G | [PE65; hArg68; NMeLeu69; Pra70; 4AmP72; Oic74; | 838 |
| [Oic][Nle]P[4-Cl—F]{FreeAcid} | Nle75; 4-Cl—F77]Apelin-13(65-77) | |
| [PE]RP [hArg][NMeLeu][Pra]H[Orn]G[Oic] | [PE65; hArg68; NMeLeu69; Pra70; Orn72; Oic74; | 839 |
| [Nle]P[4-Cl—F]{FreeAcid} | Nle75; 4-Cl—F77]Apelin-13(65-77) | |
| [PE]RP[hArg][NMeLeu][Pra]H[Dab]G[Oic] | [PE65; hArg68; NMeLeu69; Pra70; Dab72; Oic74; | 840 |
| [Nle]P[4-Cl—F]{FreeAcid} | Nle75; 4-Cl—F77]Apelin-13(65-77) | |
| [PE]RP[hArg][NMeLeu][Pra]H[Dpr]G[Oic] | [PE65; hArg68; NMeLeu69; Pra70; Dpr72; Oic74; | 841 |
| [Nle]P[4-Cl—F]{FreeAcid} | Nle75; 4-Cl—F77]Apelin-13(65-77) | |
| [PE]RP[hArg][NMeLeu][Pra]HHG[Oic] | [PE65; hArg68; NMeLeu69; Pra70; His72; Oic74; | 842 |
| [Nle]P[4-Cl—F]{FreeAcid} | Nle75; 4-Cl—F77]Apelin-13(65-77) | |
| [PE]RP[hArg][NMeLeu][Pra]H[2Pal]G[Oic] | [PE65; hArg68; NMeLeu69; Pra70; 2Pal72; Oic74; | 843 |
| [Nle]P[4-Cl—F]{FreeAcid} | Nle75; 4-Cl—F77]Apelin-13(65-77) | |
| [PE]RP[hArg][NMeLeu][Pra]H[3Pal]G[Oic] | [PE65; hArg68; NMeLeu69; Pra70; 3Pal72; Oic74; | 844 |
| [Nle]P[4-Cl—F]{FreeAcid} | Nle75; 4-Cl—F77]Apelin-13(65-77) | |
| {Acetyl}[Pra]LRP[hArg][NMeLeu][Pra] | Ac-Pra- | 845 |
| HFGP[Nle]P[4-Cl—F]{FreeAcid} | [Leu65; hArg68; NMeLeu69; Pra70; Phe72; | |
| | Nle75; 4-Cl—F77]Apelin-13(65-77) | |
| [PE]RP[hArg][NMeLeu][Pra]HRG[Oic] | [PE65; hArg68; NMeLeu69; Pra70; Arg72; Oic74; | 846 |
| [Nle]P[4-Cl—F]{FreeAcid} | Nle75; 4-Cl—F77]Apelin-13(65-77) | |
| [PE]RP[hArg][NMeLeu][Pra]H[hArg]G | [PE65; hArg68, 72; NMeLeu69; Pra70; Oic74; | 847 |
| [Oic][Nle]P[4-Cl—F]{FreeAcid} | Nle75; 4-Cl—F77]Apelin-13(65-77) | |
| [PE]RP[hArg][NMeLeu][Pra]HKP[Oic] | [PE65; hArg68; NMeLeu69; Pra70; Pro73; Oic74; | 848 |
| [Nle]P[4-Cl—F]{FreeAcid} | Nle75; 4-Cl—F77]Apelin-13(65-77) | |
| [PE]RP[hArg][NMeLeu][Pra]HK[Oic][Oic] | [PE65; hArg68; NMeLeu69; Pra70; Oic73, 74; | 849 |
| [Nle]P[4-Cl—F]{FreeAcid} | Nle75; 4-Cl—F77]Apelin-13(65-77) | |
| [PE]RP[hArg][NMeLeu][Pra]HK[bAla] | [PE65; hArg68; NMeLeu69; Pra70; bAla73; Oic74; | 850 |
| [Oic][Nle]P[4-Cl—F]{FreeAcid} | Nle75; 4-Cl—F77]Apelin-13(65-77) | |
| [PE]RP[hArg][NMeLeu][Pra]H[1- | [PE65; hArg68; NMeLeu69; Pra70; 1- | 851 |
| Nal]P[Oic][Nle]P[4-Cl—F]{FreeAcid} | Nal72; Pro73; Oic74; Nle75; 4-Cl—F77]Apelin- | |
| | 13(65-77) | |
| [PE]RP[hArg][NMeLeu][Pra]H[1- | [PE65; hArg68; NMeLeu69; Pra70; 1- | 852 |
| Nal][Oic][Oic][Nle]P[4-Cl—F]{FreeAcid} | Nal72; Oic73, 74; Nle75; 4-Cl—F77]Apelin- | |
| | 13(65-77) | |
| [PE]RP[hArg][NMeLeu][Pra]H[1- | [PE65; hArg68; NMeLeu69; Pra70; 1- | 853 |
| Nal][bAla][Oic][Nle]P[4-Cl—F]{FreeAcid} | Nal72; bAla73; Oic74; Nle75; 4- | |
| | Cl—F77]Apelin-13(65-77) | |
| [PE]RP[hArg][NMeLeu][Pra]HKP[Oic] | [PE65; hArg68; NMeLeu69; Pra70; Pro73; Oic74; | 854 |
| [Nle]P[4-Cl—F]{FreeAcid} | Nle75; 4-Cl—F77]Apelin-13(65-77) | |
| [PE]RP[hArg][NMeLeu][Pra]H[2Nal]P[Oic] | [PE65; hArg68; NMeLeu69; Pra70; 2- | 855 |
| [Nle]P[4-Cl—F]{FreeAcid} | Nal72; Pro73; Oic74; Nle75; 4-Cl—F77]Apelin- | |
| | 13(65-77) | |
| {Acetyl}[Pra]LRP[hArg][NMeLeu][Pra] | Ac-Pra- | 856 |
| H[4AmP]GP[Nle]P[4-Cl—F]{FreeAcid} | [Leu65; hArg68; NMeLeu69; Pra70; 4AmP72; | |
| | Nle75; 4-Cl—F77]Apelin-13(65-77) | |
| [PE]RP[hArg][NMeLeu][Pra]H[Bip]P[Oic] | [PE65; hArg68; NMeLeu69; Pra70; Bip72; Pro73; | 857 |
| [Nle]P[4-Cl—F]{FreeAcid} | Oic74; Nle75; 4-Cl—F77]Apelin-13(65-77) | |
| [PE]RP[hArg][NMeLeu][Pra]HFP[Oic] | [PE65; hArg68; NMeLeu69; Pra70; Phe72; Pro73; | 858 |
| [Nle]P[4-Cl—F]{FreeAcid} | Oic74; Nle75; 4-Cl—F77]Apelin-13(65-77) | |
| [PE]RP[hArg][NMeLeu][Pra]H[4AmP]P | [PE65; hArg68; NMeLeu69; Pra70; 4AmP72; Pro73; | 859 |
| [Oic][Nle]P[4-Cl—F]{FreeAcid} | Oic74; Nle75; 4-Cl—F77]Apelin-13(65-77) | |
| [PE]RP[hArg][NMeLeu][Pra]H[Orn]P[Oic] | [PE65; hArg68; NMeLeu69; Pra70; Orn72; Pro73; | 860 |
| [Nle]P[4-Cl—F]{FreeAcid} | Oic74; Nle75; 4-Cl—F77]Apelin-13(65-77) | |
| [PE]RP[hArg][NMeLeu][Pra]H[Dab]P[Oic] | [PE65; hArg68; NMeLeu69; Pra70; Dab72; Pro73; | 861 |
| [Nle]P[4-Cl—F]{FreeAcid} | Oic74; Nle75; 4-Cl—F77]Apelin-13(65-77) | |
| [PE]RP[hArg][NMeLeu][Pra]H[Dpr]P[Oic] | [PE65; hArg68; NMeLeu69; Pra70; Dpr72; Pro73; | 862 |
| [Nle]P[4-Cl—F]{FreeAcid} | Oic74; Nle75; 4-Cl—F77]Apelin-13(65-77) | |
| [PE]RP[hArg][NMeLeu][Pra]HHP[Oic] | [PE65; hArg68; NMeLeu69; Pra70; His72; Pro73; | 863 |
| [Nle]P[4-Cl—F]{FreeAcid} | Oic74; Nle75; 4-Cl—F77]Apelin-13(65-77) | |
| [PE]RP[hArg][NMeLeu][Pra]H[2Pal]P[Oic] | [PE65; hArg68; NMeLeu69; Pra70; 2Pal72; Pro73; | 864 |
| [Nle]P[4-Cl—F]{FreeAcid} | Oic74; Nle75; 4-Cl—F77]Apelin-13(65-77) | |
| [PE]RP[hArg][NMeLeu][Pra]H[3Pal]P[Oic] | [PE65; hArg68; NMeLeu69; Pra70; 3Pal72; Pro73; | 865 |
| [Nle]P[4-Cl—F]{FreeAcid} | Oic74; Nle75; 4-Cl—F77]Apelin-13(65-77) | |
| [PE]RP[hArg][NMeLeu][Pra]HRP[Oic] | [PE65; hArg68; NMeLeu69; Pra70; Arg72; Pro73; | 866 |
| [Nle]P[4-Cl—F]{FreeAcid} | Oic74; Nle75; 4-Cl—F77]Apelin-13(65-77) | |
| {Acetyl}[Pra]LRP[hArg][NMeLeu][Pra] | Ac-Pra- | 867 |
| H[Orn]GP[Nle]P[4-Cl—F]{FreeAcid} | [Leu65; hArg68; NMeLeu69; Pra70; Orn72; | |
| | Nle75; 4-Cl—F77]Apelin-13(65-77) | |
| [PE]RP[hArg][NMeLeu][Pra]H[hArg]P | [PE65; hArg68, 72; NMeLeu69; Pra70; Pro73; | 868 |
| [Oic][Nle]P[4-Cl—F]{FreeAcid} | Oic74; Nle75; 4-Cl—F77]Apelin-13(65-77) | |
| [PE]RP[hArg][NMeLeu][Pra]HKG[Oic] | [PE65; hArg68; NMeLeu69; Pra70; Oic74; | 869 |
| [Nle]P[4-Cl—F]{FreeAcid} | Nle75; 4-Cl—F77]Apelin-13(65-77) | |
| [PE]RP[hArg][NMeLeu][Pra]HKG[Oic] | [PE65; hArg68; NMeLeu69; Pra70; Oic74, 76; | 870 |
| [Nle][Oic][4-Cl—F]{FreeAcid} | Nle75; 4-Cl—F77]Apelin-13(65-77) | |
| [PE]R[Oic][hArg][NMeLeu][Pra]HKG[Oic] | [PE65; Oic67, 74, 76; hArg68; NMeLeu69; Pra70; | 871 |
| [Nle][Oic][4-Cl—F]{FreeAcid} | Nle75; 4-Cl—F77]Apelin-13(65-77) | |
| [PE]R[Oic][hArg][NMeLeu][Pra]HKG[Oic] | [PE65; Oic67, 74; hArg68; NMeLeu69; Pra70; | 872 |
| [Nle]P[4-Cl—F]{FreeAcid} | Nle75; 4-Cl—F77]Apelin-13(65-77) | |
| [PE]RP[NMeArg][NMeLeu][Pra]HKG[Oic] | [PE65; NMeArg68; NMeLeu69; Pra70; Oic74; | 873 |
| [Nle]P[4-Cl—F]{FreeAcid} | Nle75; 4-Cl—F77]Apelin-13(65-77) | |
| [PE][NMeArg]P [hArg][NMeLeu][Pra]HKG | [PE65; NMeArg66; hArg68; NMeLeu69; Pra70; | 874 |
| [Oic][Nle]P[4-Cl—F]{FreeAcid} | Oic74; Nle75; 4-Cl—F77]Apelin-13(65-77) | |
| [PE][NMeArg]P[NMeArg][NMeLeu][Pra] | [PE65; NMeArg66, 68; NMeLeu69; Pra70; Oic74; | 875 |
| HKG[Oic][Nle]P[4-Cl—F]{FreeAcid} | Nle75; 4-Cl—F77]Apelin-13(65-77) | |
| [PE]RP[hArg][NMeLeu][Pra]H[1- | [PE65; hArg68; NMeLeu69; Pra70; 1- | 876 |
| Nal]G[Oic][Nle]P[4-Cl—F]{FreeAcid} | Nal72; Oic74; Nle75; 4-Cl—F77]Apelin-13(65- | |
| | 77) | |
| [PE]RP[hArg][NMeLeu][Pra]H[1- | [PE65; hArg68; NMeLeu69; Pra70; 1- | 877 |
| Nal]G[Oic][Nle][Oic][4-Cl—F]{FreeAcid} | Nal72; Oic74, 76; Nle75; 4-Cl—F77]Apelin- | |
| | 13(65-77) | |
| {Acetyl}[Pra]LRP[hArg][NMeLeu][Pra] | Ac-Pra- | 878 |
| H[Dab]GP[Nle]P[4-Cl—F]{FreeAcid} | [Leu65; hArg68; NMeLeu69; Pra70; Dab72; | |
| | Nle75; 4-Cl—F77]Apelin-13(65-77) | |
| [PE]R[Oic][hArg][NMeLeu][Pra]H[1- | [PE65; Oic67, 74, 76; hArg68; NMeLeu69; Pra70; | 879 |
| Nal]G[Oic][Nle][Oic][4-Cl—F]{FreeAcid} | 1-Nal72; Nle75; 4-Cl—F77]Apelin-13(65- | |
| | 77) | |
| [PE]R[Oic][hArg][NMeLeu][Pra]H[1- | [PE65; Oic67, 74; hArg68; NMeLeu69; Pra70; | 880 |
| Nal]G[Oic][Nle]P[4-Cl—F]{FreeAcid} | 1-Nal72; Nle75; 4-Cl—F77]Apelin-13(65-77) | |
| [PE]RP[NMeArg][NMeLeu][Pra]H[1- | [PE65; NMeArg68; NMeLeu69; Pra70; 1- | 881 |
| Nal]G[Oic][Nle]P[4-Cl—F]{FreeAcid} | Nal72; Oic74; Nle75; 4-Cl—F77]Apelin-13(65- | |
| | 77) | |
| [PE][NMeArg]P[hArg][NMeLeu][Pra]H | [PE65; NMeArg66; hArg68; NMeLeu69; Pra70; | 882 |
| [1-Nal]G[Oic][Nle]P[4-Cl—F]{FreeAcid} | 1-Nal72; Oic74; Nle75; 4-Cl—F77]Apelin- | |
| | 13(65-77) | |
| [PE][NMeArg]P[NMeArg][NMeLeu][Pra] | [PE65; NMeArg66, 68; NMeLeu69; Pra70; 1- | 883 |
| H[1-Nal]G[Oic][Nle]P[4-Cl—F]{FreeAcid} | Nal72; Oic74; Nle75; 4-Cl—F77]Apelin-13(65- | |
| | 77) | |
| [PE]RP[hArg][NMeLeu][Pra]H[LYSIPR] | [PE65; hArg68; NMeLeu69; Pra70; LYSIPR72; | 884 |
| G[Oic][Nle]P[4-Cl—F]{FreeAcid} | Oic74; Nle75; 4-Cl—F77]Apelin-13(65-77) | |
| [PE]RP[hArg][NMeLeu][Pra]H[K(Me2)] | [PE65; hArg68; NMeLeu69; Pra70; K(Me2)72; | 885 |
| G[Oic][Nle]P[4-Cl—F]{FreeAcid} | Oic74; Nle75; 4-Cl—F77]Apelin-13(65-77) | |
| KFRRQRP[hArg][Cha]SHKG[Oic][Nle] | [hArg68; Cha69; Oic74; Nle75; 4- | 886 |
| P[4-Cl—F] | Cl—F77]Apelin-17(61-77) | |
| {MeS- | 3-(methylthio)propionyl- | 887 |
| Propionyl}KFRRQRP[hArg][Cha]SHKG | [hArg68; Cha69; Oic74; Nle75; 4- | |
| [Oic][Nle]P[4-Cl—F] | Cl—F77]Apelin-17(61-77) | |
| [Pra]KFRRQRP[hArg][Cha]SHKG[Oic] | [Pra60; hArg68; Cha69; Oic74; Nle75; 4- | 888 |
| [Nle]P[4-Cl—F] | Cl—F77]Apelin-17(60-77) | |
| [Pra]PGPWQGGRRKFRRQRP[hArg][Cha] | [Pra51; hArg68; Cha69; Oic74; Nle75; 4- | 889 |
| SHKG[Oic][Nle]P[4-Cl—F] | Cl—F77]Apelin-26(51-77) | |
| [Pra]LVQPRGSRNGPGPWQGGRRKFRRQRP | [Pra41; hArg68; Cha69; Oic74; Nle75; 4- | 890 |
| [hArg][Cha]SHKG[Oic][Nle]P[4- | Cl—F77]Apelin-36(41-77) | |
| Cl—F] | | |
| [Pra]KF[hArg][hArg]QRP[hArg][Cha]SHKG | Pra-[hArg63, 64, 68; Cha69; Oic74; Nle75; 4- | 891 |
| [Oic][Nle]P[4-Cl—F] | Cl—F77]Apelin-17(61-77) | |
| [Pra]KF[hArg][hArg]Q[hArg]P[hArg][Cha] | Pra- | 892 |
| SHKG[Oic][Nle]P[4-Cl—F] | [hArg63, 64, 66, 68; Cha69; Oic74; Nle75; 4- | |
| | Cl—F77]Apelin-17(61-77) | |
| [Pra]KF[hArg][hArg]QQP[hArg][Cha]SHKG | Pra- | 893 |
| [Oic][Nle]P[4-Cl—F] | [hArg63, 64, 68; Gln66; Cha69; Oic74; Nle75; 4- | |
| | Cl—F77]Apelin-17(61-77) | |
| [Pra]KF[hArg][hArg]Q[Cit]P[hArg][Cha] | Pra- | 894 |
| SHKG[Oic][Nle]P[4-Cl—F] | [hArg63, 64, 68; Cit66; Cha69; Oic74; Nle75; 4- | |
| | Cl—F77]Apelin-17(61-77) | |
| [Pra]KF[hArg][Cit]Q[Cit]P[hArg][Cha] | Pra- | 895 |
| SHKG[Oic][Nle]P[4-Cl—F] | [hArg63, 68; Cit64, 66; Cha69; Oic74; Nle75; 4- | |
| | Cl—F77]Apelin-17(61-77) | |
| [Pra]KF[Cit][Cit]Q[hArg]P[hArg][Cha] | Pra- | 896 |
| SHKG[Oic][Nle]P[4-Cl—F] | [Cit63, 64; hArg66, 68; Cha69; Oic74; Nle75; 4- | |
| | Cl—F77]Apelin-17(61-77) | |
| [Pra]KF[Cit][Cit]Q[Cit]P[hArg][Cha] | Pra- | 897 |
| SHKG[Oic][Nle]P[4-Cl—F] | [Cit63, 64,66; hArg68; Cha69; Oic74; Nle75; 4- | |
| | Cl—F77]Apelin-17(61-77) | |
| [Pra]OFRRQRP[hArg][Cha]SHKG[Oic] | Pra-[Orn61; hArg68; Cha69; Oic74; Nle75; 4- | 898 |
| [Nle]P[4-Cl—F] | Cl—F77]Apelin-17(61-77) | |
| [Pra]OF[hArg][hArg]Q[hArg]P[hArg][Cha] | Pra- | 899 |
| SHKG[Oic][Nle]P[4-Cl—F] | [Orn61; hArg63, 64, 66, 68; Cha69; Oic74; Nle75; | |
| | 4-Cl—F77]Apelin-17(61-77) | |
| [Pra]FRRQRP[hArg][Cha]SHKG[Oic][Nle] | [Pra61; hArg68; Cha69; Oic74; Nle75; 4- | 900 |
| P[4-Cl—F] | Cl—F77]Apelin-17(61-77) | |
| {Bromoacetyl}[NPeg11]LRP[hArg][Cha] | Bromoacetyl-NPeg11- | 901 |
| SHKG[Oic][Nle]P[4-Cl—F] {Free Acid} | [Leu65; hArg68; Cha69; Oic74; Nle75; 4- | |
| | Cl—F77]Apelin-13(65-77) | |
| {Bromoacetyl}[NPeg11]KFRRQRP[hArg] | Bromoacetyl-NPeg11- | 902 |
| [Cha] SHKG[Oic] [Nle]P[4-Cl—F] {Free Acid} | [hArg68; Cha69; Oic74; Nle75; 4- | |
| | Cl—F77]Apelin-17(61-77) | |
| {Mercaptopropionyl}KFRRQRP[hArg][Cha] | Mercaptopropionyl- | 903 |
| SHKG[Oic][Nle]P[4-Cl—F]{FreeAcid} | [hArg68; Cha69; Oic74; Nle75; 4- | |
| | Cl—F77]Apelin-17(61-77) | |
| {Mercaptopropionyl}FRRQRP[hArg][Cha] | Mercaptopropionyl- | 904 |
| SHKG[Oic][Nle]P[4-Cl—F]{FreeAcid} | [hArg68; Cha69; Oic74; Nle75; 4- | |
| | Cl—F77]Apelin-17(62-77) | |
| {Mercaptopropionyl}RRQRP[hArg][Cha] | Mercaptopropionyl- | 905 |
| SHKG[Oic][Nle]P[4-Cl—F]{FreeAcid} | [hArg68; Cha69; Oic74; Nle75; 4- | |
| | Cl—F77]Apelin-17(63-77) | |
| {Mercaptopropionyl}RQRP[hArg][Cha] | Mercaptopropionyl- | 906 |
| SHKG[Oic][Nle]P[4-Cl—F]{FreeAcid} | [hArg68; Cha69; Oic74; Nle75; 4- | |
| | Cl—F77]Apelin-17(64-77) | |
| {Mercaptopropionyl}QRP[hArg][Cha] | Mercaptopropionyl- | 907 |
| SHKG[Oic][Nle]P[4-Cl—F]{FreeAcid} | [hArg68; Cha69; Oic74; Nle75; 4- | |
| | Cl—F77]Apelin-17(65-77) | |
| {Mercaptopropionyl}LRP[hArg][Cha] | Mercaptopropionyl- | 908 |
| SHKG[Oic][Nle]P[4-Cl—F]{FreeAcid} | [Leu65; hArg68; Cha69; Oic74; Nle75; 4- | |
| | Cl—F77]Apelin-17(65-77) | |
| {Mercaptopropionyl}LLRP[hArg][Cha] | Mercaptopropionyl- | 909 |
| SHKG[Oic][Nle]P[4-Cl—F]{FreeAcid} | [Leu65; hArg68; Cha69; Oic74; Nle75; 4- | |
| | Cl—F77]Apelin-17(65-77) | |
| {Pra}LRP[hArg][Cha]SHKG[Oic][Nle]P | Pra-[Leu65; hArg68; Cha69; Oic74; Nle75; 4- | 910 |
| [4-Cl—F]{FreeAcid} | Cl—F77]Apelin-17(65-77) | |
| [PE]RP[hArg][Cha][Pra]HKG[Oic][Nle]P | [PE65; hArg68; Cha69; Pra70; Oic74; Nle75; 4- | 911 |
| [4-Cl—F]{FreeAcid} | Cl—F77]Apelin-13(65-77) | |
| [PE]RP[hArg][Cha]S[Pra]KG[Oic][Nle]P | [PE65; hArg68; Cha69; Pra71; Oic74; Nle75; 4- | 912 |
| [4-Cl—F]{FreeAcid} | Cl—F77]Apelin-13(65-77) | |
| {MeS- | 3-(methylthio)propionyl- | 913 |
| Propionyl}KFRRLRP[hArg][Cha]SHKG | [Leu65; hArg68; Cha69; Oic74; Nle75; 4- | |
| [Oic][Nle]P[4-Cl—F] | Cl—F77]Apelin-17(61-77) | |
| {MeS- | 3-(methylthio)propionyl- | 914 |
| Propionyl}KFRRARP[hArg][Cha]SHKG | [Ala65; hArg68; Cha69; Oic74; Nle75; 4- | |
| [Oic][Nle]P[4-Cl—F] | Cl—F77]Apelin-17(61-77) | |
| {MeS- | 3-(methylthio)propionyl- | 915 |
| Propionyl}KFRRVRP[hArg][Cha]SHKG | [Val65; hArg68; Cha69; Oic74; Nle75; 4- | |
| [Oic][Nle]P[4-Cl—F] | Cl—F77]Apelin-17(61-77) | |
| {MeS- | 3-(methylthio)propionyl- | 916 |
| Propionyl}KFRRIRP[hArg][Cha]SHKG | [Ile65; hArg68; Cha69; Oic74; Nle75; 4- | |
| [Oic][Nle]P[4-Cl—F] | Cl—F77]Apelin-17(61-77) | |
| {MeS- | 3-(methylthio)propionyl- | 917 |
| Propionyl}KFRRFRP[hArg][Cha]SHKG | [Phe65; hArg68; Cha69; Oic74; Nle75; 4- | |
| [Oic][Nle]P[4-Cl—F] | Cl—F77]Apelin-17(61-77) | |
| {MeS- | 3-(methylthio)propionyl- | 918 |
| Propionyl}KFRRYRP[hArg][Cha]SHKG | [Tyr65; hArg68; Cha69; Oic74; Nle75; 4- | |
| [Oic][Nle]P[4-Cl—F] | Cl—F77]Apelin-17(61-77) | |
| {MeS- | 3-(methylthio)propionyl- | 919 |
| Propionyl}KFRRL[hArg]P[hArg][Cha] | [Leu65; hArg66, 68; Cha69; Oic74; Nle75; 4- | |
| SHKG[Oic][Nle]P[4-Cl—F] | Cl—F77]Apelin-17(61-77) | |
| {MeS- | 3-(methylthio)propionyl- | 920 |
| Propionyl}KFRKLRP[hArg][Cha]SHKG | [Lys64; Leu65; hArg68; Cha69; Oic74; Nle75; | |
| [Oic][Nle]P[4-Cl—F] | 4-Cl—F77]Apelin-17(61-77) | |
| {MeS- | 3-(methylthio)propionyl- | 921 |
| Propionyl}KFR[Orn]LRP[hArg][Cha] | [Orn64; Leu65; hArg68; Cha69; Oic74; Nle75; | |
| SHKG[Oic][Nle]P[4-Cl—F] | 4-Cl—F77]Apelin-17(61-77) | |
| {MeS- | 3-(methylthio)propionyl- | 922 |
| Propionyl}KFRHLRP[hArg][Cha]SHKG | [His64; Leu65; hArg68; Cha69; Oic74; Nle75; | |
| [Oic][Nle]P[4-Cl—F] | 4-Cl—F77]Apelin-17(61-77) | |
| {MeS- | 3-(methylthio)propionyl- | 923 |
| Propionyl}KFRWLRP[hArg][Cha]SHKG | [Trp64; Leu65; hArg68; Cha69; Oic74; Nle75; | |
| [Oic][Nle]P[4-Cl—F] | 4-Cl—F77]Apelin-17(61-77) | |
| {MeS- | 3-(methylthio)propionyl- | 924 |
| Propionyl}KFRFLRP[hArg][Cha]SHKG | [Phe64; Leu65; hArg68; Cha69; Oic74; Nle75; | |
| [Oic][Nle]P[4-Cl—F] | 4-Cl—F77]Apelin-17(61-77) | |
| {MeS- | 3-(methylthio)propionyl- | 925 |
| Propionyl}KFRYLRP[hArg][Cha]SHKG | [Tyr64; Leu65; hArg68; Cha69; Oic74; Nle75; | |
| [Oic][Nle]P[4-Cl—F] | 4-Cl—F77]Apelin-17(61-77) | |
| {MeS- | 3-(methylthio)propionyl- | 926 |
| Propionyl}KFR[3Pal]LRP[hArg][Cha] | [3Pal64; Leu65; hArg68; Cha69; Oic74; Nle75; | |
| SHKG[Oic][Nle]P[4-Cl—F] | 4-Cl—F77]Apelin-17(61-77) | |
| {MeS- | 3-(methylthio)propionyl- | 927 |
| Propionyl}KFR[2Pal]LRP[hArg][Cha] | [2Pal64; Leu65; hArg68; Cha69; Oic74; Nle75; | |
| SHKG[Oic][Nle]P[4-Cl—F] | 4-Cl—F77]Apelin-17(61-77) | |
| {MeS- | 3-(methylthio)propionyl- | 928 |
| Propionyl}KFHRLRP[hArg][Cha]SHKG | [His63; Leu65; hArg68; Cha69; Oic74; Nle75; | |
| [Oic][Nle]P[4-Cl—F] | 4-Cl—F77]Apelin-17(61-77) | |
| {MeS- | 3-(methylthio)propionyl- | 929 |
| Propionyl}KFWRLRP[hArg][Cha]SHKG | [Trp63; Leu65; hArg68; Cha69; Oic74; Nle75; | |
| [Oic][Nle]P[4-Cl—F] | 4-Cl—F77]Apelin-17(61-77) | |
| {MeS- | 3-(methylthio)propionyl- | 930 |
| Propionyl}KFFRLRP[hArg][Cha]SHKG | [Phe63; Leu65; hArg68; Cha69; Oic74; Nle75; | |
| [Oic][Nle]P[4-Cl—F] | 4-Cl—F77]Apelin-17(61-77) | |
| {MeS- | 3-(methylthio)propionyl- | 931 |
| Propionyl}KFYRLRP[hArg][Cha]SHKG | [Tyr63; Leu65; hArg68; Cha69; Oic74; Nle75; | |
| [Oic][Nle]P[4-Cl—F] | 4-Cl—F77]Apelin-17(61-77) | |
| {MeS- | 3-(methylthio)propionyl- | 932 |
| Propionyl}KF[3Pal]RLRP[hArg][Cha] | [3Pal63; Leu65; hArg68; Cha69; Oic74; Nle75; | |
| SHKG[Oic][Nle]P[4-Cl—F] | 4-Cl—F77]Apelin-17(61-77) | |
| {MeS- | 3-(methylthio)propionyl- | 933 |
| Propionyl}KF[2Pal]RLRP[hArg][Cha] | [2Pal63; Leu65; hArg68; Cha69; Oic74; Nle75; | |
| SHKG[Oic][Nle]P[4-Cl—F] | 4-Cl—F77]Apelin-17(61-77) | |
| {MeS- | 3-(methylthio)propionyl- | 934 |
| Propionyl}FRKLRP[hArg][Cha]SHKG[Oic] | [Lys64; Leu65; hArg68; Cha69; Oic74; Nle75; | |
| [Nle]P[4-Cl—F] | 4-Cl—F77]Apelin-17(62-77) | |
| {MeS- | 3-(methylthio)propionyl- | 935 |
| Propionyl}FR[Orn]LRP[hArg][Cha]SHKG | [Orn64; Leu65; hArg68; Cha69; Oic74; Nle75; | |
| [Oic][Nle]P[4-Cl—F] | 4-Cl—F77]Apelin-17(62-77) | |
| {MeS- | 3-(methylthio)propionyl- | 936 |
| Propionyl}FRHLRP[hArg][Cha]SHKG[Oic] | [His64; Leu65; hArg68; Cha69; Oic74; Nle75; | |
| [Nle]P[4-Cl—F] | 4-Cl—F77]Apelin-17(62-77) | |
| {MeS- | 3-(methylthio)propionyl- | 937 |
| Propionyl}FRWLRP[hArg][Cha]SHKG | [Trp64; Leu65; hArg68; Cha69; Oic74; Nle75; | |
| [Oic][Nle]P[4-Cl—F] | 4-Cl—F77]Apelin-17(62-77) | |
| {MeS- | 3-(methylthio)propionyl- | 938 |
| Propionyl}FRFLRP[hArg][Cha]SHKG[Oic] | [Phe64; Leu65; hArg68; Cha69; Oic74; Nle75; | |
| [Nle]P[4-Cl—F] | 4-Cl—F77]Apelin-17(62-77) | |
| {MeS- | 3-(methylthio)propionyl- | 939 |
| Propionyl}FRYLRP[hArg][Cha]SHKG[Oic] | [Tyr64; Leu65; hArg68; Cha69; Oic74; Nle75; | |
| [Nle]P[4-Cl—F] | 4-Cl—F77]Apelin-17(62-77) | |
| {MeS- | 3-(methylthio)propionyl- | 940 |
| Propionyl}FKRLRP[hArg][Cha]SHKG[Oic] | [Lys63; Leu65; hArg68; Cha69; Oic74; Nle75; | |
| [Nle]P[4-Cl—F] | 4-Cl—F77]Apelin-17(62-77) | |
| {MeS- | 3-(methylthio)propionyl- | 941 |
| Propionyl}F[Orn]RLRP[hArg][Cha]SHKG | [Orn63; Leu65; hArg68; Cha69; Oic74; Nle75; | |
| [Oic][Nle]P[4-Cl—F] | 4-Cl—F77]Apelin-17(62-77) | |
| {MeS- | 3-(methylthio)propionyl- | 942 |
| Propionyl}FHRLRP[hArg][Cha]SHKG[Oic] | [His63; Leu65; hArg68; Cha69; Oic74; Nle75; | |
| [Nle]P[4-Cl—F] | 4-Cl—F77]Apelin-17(62-77) | |
| {MeS- | 3-(methylthio)propionyl- | 943 |
| Propionyl}FWRLRP[hArg][Cha]SHKG | [Trp63; Leu65; hArg68; Cha69; Oic74; Nle75; | |
| [Oic][Nle]P[4-Cl—F] | 4-Cl—F77]Apelin-17(62-77) | |
| {MeS- | 3-(methylthio)propionyl- | 944 |
| Propionyl}FFRLRP[hArg][Cha]SHKG[Oic] | [Phe63; Leu65; hArg68; Cha69; Oic74; Nle75; | |
| [Nle]P[4-Cl—F] | 4-Cl—F77]Apelin-17(62-77) | |
| {MeS- | 3-(methylthio)propionyl- | 945 |
| Propionyl}FYRLRP[hArg][Cha]SHKG[Oic] | [Tyr63; Leu65; hArg68; Cha69; Oic74; Nle75; | |
| [Nle]P[4-Cl—F] | 4-Cl—F77]Apelin-17(62-77) | |
| {MeS- | 3-(methylthio)propionyl- | 946 |
| Propionyl}F[3Pal]RLRP[hArg][Cha]SHKG | [3Pal63; Leu65; hArg68; Cha69; Oic74; Nle75; | |
| [Oic][Nle]P[4-Cl—F] | 4-Cl—F77]Apelin-17(62-77) | |
| {MeS- | 3-(methylthio)propionyl- | 947 |
| Propionyl}F[2Pal]RLRP[hArg][Cha]SHKG | [2Pal63; Leu65; hArg68; Cha69; Oic74; Nle75; | |
| [Oic][Nle]P[4-Cl—F] | 4-Cl—F77]Apelin-17(62-77) | |
| {MeS- | 3-(methylthio)propionyl- | 948 |
| Propionyl}KFRRL[hArg]P[hArg][Cha] | [Leu65; hArg66, 68; Cha69; Oic74; Nle75; 4- | |
| SHKG[Oic][Nle]P[4-Cl—F] | Cl—F77]Apelin-17(61-77) | |
| {MeS- | 3-(methylthio)propionyl- | 949 |
| Propionyl}FQQL[hArg]P[hArg][Cha]SHKG | [Gln63, 64; Leu65; hArg66, 68; Cha69; Oic74; | |
| [Oic][Nle]P[4-Cl—F] | Nle75; 4-Cl—F77]Apelin-17(62-77) | |
| {MeS- | 3-(methylthio)propionyl- | 950 |
| Propionyl}KF[Cit][Cit]L[hArg]P[hArg] | [Cit63, 64; Leu65; hArg66, 68; Cha69; Oic74; | |
| [Cha]SHKG[Oic][Nle]P[4-Cl—F] | Nle75; 4-Cl—F77]Apelin-17(61-77) | |
| {MeS- | 3-(methylthio)propionyl- | 951 |
| Propionyl}F[Cit][Cit]L[hArg]P[hArg][Cha] | [Cit63, 64; Leu65; hArg66, 68; Cha69; Oic74; | |
| SHKG[Oic][Nle]P[4-Cl—F] | Nle75; 4-Cl—F77]Apelin-17(62-77) | |
| {MeS- | 3-(methylthio)propionyl- | 952 |
| Propionyl}KFARL[hArg]P[hArg][Cha] | [Ala63; Leu65; hArg66, 68; Cha69; Oic74; Nle75; | |
| SHKG[Oic][Nle]P[4-Cl—F] | 4-Cl—F77]Apelin-17(61-77) | |
| {MeS- | 3-(methylthio)propionyl- | 953 |
| Propionyl}KFERL[hArg]P[hArg][Cha] | [Glu63; Leu65; hArg66, 68; Cha69; Oic74; Nle75; | |
| SHKG[Oic][Nle]P[4-Cl—F] | 4-Cl—F77]Apelin-17(61-77) | |
| {MeS- | 3-(methylthio)propionyl- | 954 |
| Propionyl}KFTRL[hArg]P[hArg][Cha] | [Thr63; Leu65; hArg66, 68; Cha69; Oic74; Nle75; | |
| SHKG[Oic][Nle]P[4-Cl—F] | 4-Cl—F77]Apelin-17(61-77) | |
| {MeS- | 3-(methylthio)propionyl- | 955 |
| Propionyl}KFYRL[hArg]P[hArg][Cha] | [Tyr63; Leu65; hArg66, 68; Cha69; Oic74; Nle75; | |
| SHKG[Oic][Nle]P[4-Cl—F] | 4-Cl—F77]Apelin-17(61-77) | |
| {MeS- | 3-(methylthio)propionyl- | 956 |
| Propionyl}KFIRL[hArg]P[hArg][Cha] | [Ile63; Leu65; hArg66, 68; Cha69; Oic74; Nle75; | |
| SHKG[Oic][Nle]P[4-Cl—F] | 4-Cl—F77]Apelin-17(61-77) | |
| {MeS- | 3-(methylthio)propionyl- | 957 |
| Propionyl}KFPRL[hArg]P[hArg][Cha] | [Pro63; Leu65; hArg66, 68; Cha69; Oic74; Nle75; | |
| SHKG[Oic][Nle]P[4-Cl—F] | 4-Cl—F77]Apelin-17(61-77) | |
| {MeS- | 3-(methylthio)propionyl- | 958 |
| Propionyl}KFSRL[hArg]P[hArg][Cha] | [Ser63; Leu65; hArg66, 68; Cha69; Oic74; Nle75; | |
| SHKG[Oic][Nle]P[4-Cl—F] | 4-Cl—F77]Apelin-17(61-77) | |
| {MeS- | 3-(methylthio)propionyl- | 959 |
| Propionyl}KFFRL[hArg]P[hArg][Cha] | [Phe63; Leu65; hArg66, 68; Cha69; Oic74; Nle75; | |
| SHKG[Oic][Nle]P[4-Cl—F] | 4-Cl—F77]Apelin-17(61-77) | |
| {MeS- | 3-(methylthio)propionyl- | 960 |
| Propionyl}KFLRL[hArg]P[hArg][Cha] | [Leu63,65; hArg66, 68; Cha69; Oic74; Nle75; 4- | |
| SHKG[Oic][Nle]P[4-Cl—F] | Cl—F77]Apelin-17(61-77) | |
| {MeS- | 3-(methylthio)propionyl- | 961 |
| Propionyl}KFVRL[hArg]P[hArg][Cha] | [Val63; Leu65; hArg66, 68; Cha69; Oic74; Nle75; | |
| SHKG[Oic][Nle]P[4-Cl—F] | 4-Cl—F77]Apelin-17(61-77) | |
| {MeS- | 3-(methylthio)propionyl- | 962 |
| Propionyl}KFRQL[hArg]P[hArg][Cha] | [Gln64; Leu65; hArg66, 68; Cha69; Oic74; Nle75; | |
| SHKG[Oic][Nle]P[4-Cl—F] | 4-Cl—F77]Apelin-17(61-77) | |
| {MeS- | 3-(methylthio)propionyl- | 963 |
| Propionyl}KFRAL[hArg]P[hArg][Cha] | [Ala64; Leu65; hArg66, 68; Cha69; Oic74; Nle75; | |
| SHKG[Oic][Nle]P[4-Cl—F] | 4-Cl—F77]Apelin-17(61-77) | |
| {MeS- | 3-(methylthio)propionyl- | 964 |
| Propionyl}KFREL[hArg]P[hArg][Cha] | [Glu64; Leu65; hArg66, 68; Cha69; Oic74; Nle75; | |
| SHKG[Oic][Nle]P[4-Cl—F] | 4-Cl—F77]Apelin-17(61-77) | |
| {MeS- | 3-(methylthio)propionyl- | 965 |
| Propionyl}KFRTL[hArg]P[hArg][Cha] | [Thr64; Leu65; hArg66, 68; Cha69; Oic74; Nle75; | |
| SHKG[Oic][Nle]P[4-Cl—F] | 4-Cl—F77]Apelin-17(61-77) | |
| {MeS- | 3-(methylthio)propionyl- | 966 |
| Propionyl}KFRYL[hArg]P[hArg][Cha] | [Tyr64; Leu65; hArg66, 68; Cha69; Oic74; Nle75; | |
| SHKG[Oic][Nle]P[4-Cl—F] | 4-Cl—F77]Apelin-17(61-77) | |
| {MeS- | 3-(methylthio)propionyl- | 967 |
| Propionyl}KFRIL[hArg]P[hArg][Cha] | [Ile64; Leu65; hArg66, 68; Cha69; Oic74; Nle75; | |
| SHKG[Oic][Nle]P[4-Cl—F] | 4-Cl—F77]Apelin-17(61-77) | |
| {MeS- | 3-(methylthio)propionyl- | 968 |
| Propionyl}KFRPL[hArg]P[hArg][Cha] | [Pro64; Leu65; hArg66, 68; Cha69; Oic74; Nle75; | |
| SHKG[Oic][Nle]P[4-Cl—F] | 4-Cl—F77]Apelin-17(61-77) | |
| {MeS- | 3-(methylthio)propionyl- | 969 |
| Propionyl}KFRSL[hArg]P[hArg][Cha] | [Ser64; Leu65; hArg66, 68; Cha69; Oic74; Nle75; | |
| SHKG[Oic][Nle]P[4-Cl—F] | 4-Cl—F77]Apelin-17(61-77) | |
| {MeS- | 3-(methylthio)propionyl- | 970 |
| Propionyl}KFRFL[hArg]P[hArg][Cha] | [Phe64; Leu65; hArg66, 68; Cha69; Oic74; Nle75; | |
| SHKG[Oic][Nle]P[4-Cl—F] | 4-Cl—F77]Apelin-17(61-77) | |
| {MeS- | 3-(methylthio)propionyl- | 971 |
| Propionyl}KFRLL[hArg]P[hArg][Cha] | [Leu64, 65; hArg66, 68; Cha69; Oic74; Nle75; 4- | |
| SHKG[Oic][Nle]P[4-Cl—F] | Cl—F77]Apelin-17(61-77) | |
| {MeS- | 3-(methylthio)propionyl- | 972 |
| Propionyl}KFRVL[hArg]P[hArg][Cha] | [Val64; Leu65; hArg66, 68; Cha69; Oic74; Nle75; | |
| SHKG[Oic][Nle]P[4-Cl—F] | 4-Cl—F77]Apelin-17(61-77) | |
| {MeS- | 3-(methylthio)propionyl- | 973 |
| Propionyl}FARL[hArg]P[hArg][Cha] | [Ala63; Leu65; hArg66, 68; Cha69; Oic74; Nle75; | |
| SHKG[Oic][Nle]P[4-Cl—F] | 4-Cl—F77]Apelin-17(62-77) | |
| {MeS- | 3-(methylthio)propionyl- | 974 |
| Propionyl}FERL[hArg]P[hArg][Cha] | [Glu63; Leu65; hArg66, 68; Cha69; Oic74; Nle75; | |
| SHKG[Oic][Nle]P[4-Cl—F] | 4-Cl—F77]Apelin-17(62-77) | |
| {MeS- | 3-(methylthio)propionyl- | 975 |
| Propionyl}FTRL[hArg]P[hArg][Cha] | [Thr63; Leu65; hArg66, 68; Cha69; Oic74; Nle75; | |
| SHKG[Oic][Nle]P[4-Cl—F] | 4-Cl—F77]Apelin-17(62-77) | |
| {MeS- | 3-(methylthio)propionyl- | 976 |
| Propionyl}FYRL[hArg]P[hArg][Cha] | [Tyr63; Leu65; hArg66, 68; Cha69; Oic74; Nle75; | |
| SHKG[Oic][Nle]P[4-Cl—F] | 4-Cl—F77]Apelin-17(62-77) | |
| {MeS- | 3-(methylthio)propionyl- | 977 |
| Propionyl}FIRL[hArg]P[hArg][Cha] | [Ile63; Leu65; hArg66, 68; Cha69; Oic74; Nle75; | |
| SHKG[Oic][Nle]P[4-Cl—F] | 4-Cl—F77]Apelin-17(62-77) | |
| {MeS- | 3-(methylthio)propionyl- | 978 |
| Propionyl}FPRL[hArg]P[hArg][Cha] | [Pro63; Leu65; hArg66, 68; Cha69; Oic74; Nle75; | |
| SHKG[Oic][Nle]P[4-Cl—F] | 4-Cl—F77]Apelin-17(62-77) | |
| {MeS- | 3-(methylthio)propionyl- | 979 |
| Propionyl}FSRL[hArg]P[hArg][Cha] | [Ser63; Leu65; hArg66, 68; Cha69; Oic74; Nle75; | |
| SHKG[Oic][Nle]P[4-Cl—F] | 4-Cl—F77]Apelin-17(62-77) | |
| {MeS- | 3-(methylthio)propionyl- | 980 |
| Propionyl}FFRL[hArg]P[hArg][Cha] | [Phe63; Leu65; hArg66, 68; Cha69; Oic74; Nle75; | |
| SHKG[Oic][Nle]P[4-Cl—F] | 4-Cl—F77]Apelin-17(62-77) | |
| {MeS- | 3-(methylthio)propionyl- | 981 |
| Propionyl}FLRL[hArg]P[hArg][Cha] | [Leu63; Leu65; hArg66, 68; Cha69; Oic74; Nle75; | |
| SHKG[Oic][Nle]P[4-Cl—F] | 4-Cl—F77]Apelin-17(62-77) | |
| {MeS- | 3-(methylthio)propionyl- | 982 |
| Propionyl}FVRL[hArg]P[hArg][Cha] | [Val63; Leu65; hArg66, 68; Cha69; Oic74; Nle75; | |
| SHKG[Oic][Nle]P[4-Cl—F] | 4-Cl—F77]Apelin-17(62-77) | |
| {MeS- | 3-(methylthio)propionyl- | 983 |
| Propionyl}FRQL[hArg]P[hArg][Cha] | [Gln64; Leu65; hArg66, 68; Cha69; Oic74; Nle75; | |
| SHKG[Oic][Nle]P[4-Cl—F] | 4-Cl—F77]Apelin-17(62-77) | |
| {MeS- | 3-(methylthio)propionyl- | 984 |
| Propionyl}FRAL[hArg]P[hArg][Cha] | [Ala64; Leu65; hArg66, 68; Cha69; Oic74; Nle75; | |
| SHKG[Oic][Nle]P[4-Cl—F] | 4-Cl—F77]Apelin-17(62-77) | |
| {MeS- | 3-(methylthio)propionyl- | 985 |
| Propionyl}FREL[hArg]P[hArg][Cha] | [Glu64; Leu65; hArg66, 68; Cha69; Oic74; Nle75; | |
| SHKG[Oic][Nle]P[4-Cl—F] | 4-Cl—F77]Apelin-17(62-77) | |
| {MeS- | 3-(methylthio)propionyl- | 986 |
| Propionyl}FRTL[hArg]P[hArg][Cha] | [Thr64; Leu65; hArg66, 68; Cha69; Oic74; Nle75; | |
| SHKG[Oic][Nle]P[4-Cl—F] | 4-Cl—F77]Apelin-17(62-77) | |
| {MeS- | 3-(methylthio)propionyl- | 987 |
| Propionyl}FRYL[hArg]P[hArg][Cha] | [Tyr64; Leu65; hArg66, 68; Cha69; Oic74; Nle75; | |
| SHKG[Oic][Nle]P[4-Cl—F] | 4-Cl—F77]Apelin-17(62-77) | |
| {MeS- | 3-(methylthio)propionyl- | 988 |
| Propionyl}FRIL[hArg]P[hArg][Cha] | [Ile64; Leu65; hArg66, 68; Cha69; Oic74; Nle75; | |
| SHKG[Oic][Nle]P[4-Cl—F] | 4-Cl—F77]Apelin-17(62-77) | |
| {MeS- | 3-(methylthio)propionyl- | 989 |
| Propionyl}FRPL[hArg]P[hArg][Cha] | [Pro64; Leu65; hArg66, 68; Cha69; Oic74; Nle75; | |
| SHKG[Oic][Nle]P[4-Cl—F] | 4-Cl—F77]Apelin-17(62-77) | |
| {MeS- | 3-(methylthio)propionyl- | 990 |
| Propionyl}FRSL[hArg]P[hArg][Cha] | [Ser64; Leu65; hArg66, 68; Cha69; Oic74; Nle75; | |
| SHKG[Oic][Nle]P[4-Cl—F] | 4-Cl—F77]Apelin-17(62-77) | |
| {MeS- | 3-(methylthio)propionyl- | 991 |
| Propionyl}FRFL[hArg]P[hArg][Cha] | [Phe64; Leu65; hArg66, 68; Cha69; Oic74; Nle75; | |
| SHKG[Oic][Nle]P[4-Cl—F] | 4-Cl—F77]Apelin-17(62-77) | |
| {MeS- | 3-(methylthio)propionyl- | 992 |
| Propionyl}FRLL[hArg]P[hArg][Cha] | [Leu64, 65; hArg66, 68; Cha69; Oic74; Nle75; 4- | |
| SHKG[Oic][Nle]P[4-Cl—F] | Cl—F77]Apelin-17(62-77) | |
| {MeS- | 3-(methylthio)propionyl- | 993 |
| Propionyl}FRVL[hArg]P[hArg][Cha] | [Val64; Leu65; hArg66, 68; Cha69; Oic74; Nle75; | |
| SHKG[Oic][Nle]P[4-Cl—F] | 4-Cl—F77]Apelin-17(62-77) | |
| {MeS- | 3-(methylthio)propionyl- | 994 |
| Propionyl}KFRRQRP[hArg][Cha]SHKG | [hArg68; Cha69; Oic74; Nle75]Apelin-17(61- | |
| [Oic][Nle]P{Amide} | 76)-Amide | |
| {MeS- | 3-(methylthio)propionyl- | 995 |
| Propionyl}KF[Cit][Cit]L[hArg]P[hArg] | [Cit63, 64; Leu65; hArg66, 68; Cha69; Oic74; | |
| [Cha]SHKG[Oic][Nle]P{Amide} | Nle75]Apelin-17(61-76)-Amide | |
| {MeS- | 3-(methylthio)propionyl- | 996 |
| Propionyl}F[Cit][Cit]L[hArg]P[hArg][Cha] | [Cit63, 64; Leu65; hArg66, 68; Cha69; Oic74; | |
| SHKG[Oic][Nle]P{Amide} | Nle75]Apelin-17(62-76)-Amide | |
| {MeS- | 3-(methylthio)propionyl- | 997 |
| Propionyl}KFRRL[hArg]P[hArg][Cha]SHKG | [Leu65; hArg66, 68; Cha69; Oic74; | |
| [Oic][Nle]P{Amide} | Nle75]Apelin-17(61-76)-Amide | |
| {MeS- | 3-(methylthio)propionyl- | 998 |
| Propionyl}FQQL[hArg]P[hArg][Cha]SHKG | [Gln63, 64; Leu65; hArg66, 68; Cha69; Oic74; | |
| [Oic][Nle]P{Amide} | Nle75]Apelin-17(62-76)-Amide | |
| {MeS- | 3-(methylthio)propionyl- | 999 |
| Propionyl}FRRQRP[hArg][Cha]SHKG | [hArg68; Cha69; Oic74; Nle75; 4- | |
| [Oic][Nle]P[4-Cl—F]{COOH} | Cl—F77]Apelin-17(62-77) | |
| {MeS- | 3-(methylthio)propionyl- | 1000 |
| Propionyl}F[hArg][hArg]Q[hArg]P[hArg] | [hArg63, 64, 66, 68; Cha69; Oic74; Nle75; 4- | |
| [Cha]SHKG[Oic][Nle]P[4-Cl—F]{COOH} | Cl—F77]Apelin-17(62-77) | |
| {MeS- | 3-(methylthio)propionyl- | 1001 |
| Propionyl}A[hArg][hArg]Q[hArg]P[hArg] | [Ala62; hArg63, 64, 66, 68; Cha69; Oic74; Nle75; | |
| [Cha]SHKG[Oic][Nle]P[4-Cl—F]{COOH} | 4-Cl—F77]Apelin-17(62-77) | |
| {MeS- | 3-(methylthio)propionyl- | 1002 |
| Propionyl}FAQ[hArg]P[hArg][Cha]SHKG | [Phe63; Ala64; hArg66, 68; Cha69; Oic74; Nle75; | |
| [Oic][Nle]P[4-Cl—F]{COOH} | 4-Cl—F77]Apelin-17(63-77) | |
| {MeS- | 3-(methylthio)propionyl- | 1003 |
| Propionyl}F[hArg]AQ[hArg]P[hArg][Cha] | [hArg63, 66, 68; Ala64; Cha69; Oic74; Nle75; 4- | |
| SHKG[Oic][Nle]P[4-Cl—F]{COOH} | Cl—F77]Apelin-17(62-77) | |
| {MeS- | 3-(methylthio)propionyl- | 1004 |
| Propionyl}F[hArg][hArg]A[hArg]P[hArg] | [hArg63, 64, 66, 68; Ala65; Cha69; Oic74; Nle75; | |
| [Cha]SHKG[Oic][Nle]P[4-Cl—F]{COOH} | 4-Cl—F77]Apelin-17(62-77) | |
| {MeS- | 3-(methylthio)propionyl- | 1005 |
| Propionyl}F[hArg][hArg]QAP[hArg][Cha] | [hArg63, 64, 68; Ala66; Cha69; Oic74; Nle75; 4- | |
| SHKG[Oic][Nle]P[4-Cl—F]{COOH} | Cl—F77]Apelin-17(62-77) | |
| {MeS- | 3-(methylthio)propionyl- | 1006 |
| Propionyl}F[hArg][hArg]Q[hArg][Oic] | [hArg63, 64, 66, 68; Oic67, 74; Cha69; Nle75; 4- | |
| [hArg][Cha]SHKG[Oic][Nle]P[4-Cl—F]{COOH} | Cl—F77]Apelin-17(62-77) | |
| {MeS- | 3-(methylthio)propionyl- | 1007 |
| Propionyl}F[hArg][hArg]Q[hArg]P[hArg] | [hArg63, 64, 66, 68; Cha69; Oic74, 76; Nle75; 4- | |
| [Cha]SHKG[Oic][Nle][Oic][4-Cl—F]{COOH} | Cl—F77]Apelin-17(62-77) | |
| {MeS- | 3-(methylthio)propionyl- | 1008 |
| Propionyl}F[hArg][hArg]Q[hArg][Oic][hArg] | [hArg63, 64, 66, 68; Oic67, 74, 76; Cha69; Nle75; | |
| [Cha]SHKG[Oic][Nle][Oic][4-Cl—F]{COOH} | 4-Cl—F77]Apelin-17(62-77) | |
| {MeS- | 3-(methylthio)propionyl- | 1009 |
| Propionyl}F[hArg][hArg]Q[hArg]P[hArg] | [hArg63, 64, 66, 68; Cha69; K(NPeg11)70; Oic74; | |
| [Cha][K(NPeg11)]HKG[Oic][Nle]P[4- | Nle75; 4-Cl—F77]Apelin-17(62-77) | |
| Cl—F]{COOH} | | |
| {MeS- | 3-(methylthio)propionyl- | 1010 |
| Propionyl}F[hArg][hArg]Q[hArg]P[hArg] | [hArg63, 64, 66, 68; Cha69; K(NPeg11)71; Oic74; | |
| [Cha]S[K(NPeg11)]KG[Oic][Nle]P[4- | Nle75; 4-Cl—F77]Apelin-17(62-77) | |
| Cl—F]{COOH} | | |
| {MeS- | 3-(methylthio)propionyl- | 1011 |
| Propionyl}F[hArg][hArg]Q[hArg]P[hArg] | [hArg63, 64, 66, 68; Cha69; K(NPeg11)72; Oic74; | |
| [Cha]SH[K(NPeg11)]G[Oic][Nle]P[4- | Nle75; 4-Cl—F77]Apelin-17(62-77) | |
| Cl—F]{COOH} | | |
| {MeS- | 3-(methylthio)propionyl- | 1012 |
| Propionyl}F[hArg][hArg]Q[hArg]P[hArg] | [hArg63, 64, 66, 68; Cha69; Atz(PEG10)70; Oic74; | |
| [Cha][Atz(PEG10)]HKG[Oic][Nle]P[4- | Nle75; 4-Cl—F77]Apelin-17(62-77) | |
| Cl—F]{COOH} | | |
| {MeS- | 3-(methylthio)propionyl- | 1013 |
| Propionyl}F[hArg][hArg]Q[hArg]P[hArg] | [hArg63, 64, 66, 68; Cha69; Atz(PEG10)71; Oic74; | |
| [Cha]S[Atz(PEG10)]KG[Oic][Nle]P[4- | Nle75; 4-Cl—F77]Apelin-17(62-77) | |
| Cl—F]{COOH} | | |
| {MeS- | 3-(methylthio)propionyl- | 1015 |
| Propionyl}F[hArg][hArg]Q[hArg]P[hArg] | [hArg63, 64, 66, 68; Cha69; Thr70; Oic74; Nle75; | |
| [Cha]THKG[Oic][Nle]P[4-Cl—F]{COOH} | 4-Cl—F77]Apelin-17(62-77) | |
| {MeS- | 3-(methylthio)propionyl- | 1016 |
| Propionyl}F[hArg][hArg]Q[hArg]P[hArg] | [hArg63, 64, 66, 68; Cha69; Ala70; Oic74; Nle75; | |
| [Cha]AHKG[Oic][Nle]P[4-Cl—F]{COOH} | 4-Cl—F77]Apelin-17(62-77) | |
| {MeS- | 3-(methylthio)propionyl- | 1017 |
| Propionyl}F[hArg][hArg]Q[hArg]P[hArg] | [hArg63, 64, 66, 68; Cha69; Abu70; Oic74; Nle75; | |
| [Cha][Abu]HKG[Oic][Nle]P[4-Cl—F]{COOH} | 4-Cl—F77]Apelin-17(62-77) | |
| {MeS- | 3-(methylthio)propionyl- | 1018 |
| Propionyl}F[hArg][hArg]Q[hArg]P[hArg] | [hArg63, 64, 66, 68; Cha69; Nle70,75; Oic74; 4- | |
| [Cha][Nle]HKG[Oic][Nle]P [4-Cl—F]{COOH} | Cl—F77]Apelin-17(62-77) | |
| {MeS- | 3-(methylthio)propionyl- | 1019 |
| Propionyl}F[hArg][hArg]Q[hArg]P[hArg] | [hArg63, 64, 66, 68; Cha69; Nva70; Oic74; Nle75; | |
| [Cha][Nva]HKG[Oic][Nle]P[4-Cl—F]{COOH} | 4-Cl—F77]Apelin-17(62-77) | |
| {MeS- | 3-(methylthio)propionyl- | 1020 |
| Propionyl}F[hArg][hArg]Q[hArg]P[hArg] | [hArg63, 64, 66, 68; Cha69; Val70; Oic74; Nle75; | |
| [Cha]VHKG[Oic][Nle]P[4-Cl—F]{COOH} | 4-Cl—F77]Apelin-17(62-77) | |
| {MeS- | 3-(methylthio)propionyl- | 1021 |
| Propionyl}F[hArg][hArg]Q[hArg]P[hArg] | [hArg63, 64, 66, 68; Cha69; Gly70; Oic74; Nle75; | |
| [Cha]GHKG[Oic][Nle]P[4-Cl—F]{COOH} | 4-Cl—F77]Apelin-17(62-77) | |
| {MeS- | 3-(methylthio)propionyl- | 1022 |
| Propionyl}F[hArg][hArg]Q[hArg]P[hArg] | [hArg63, 64, 66, 68; Cha69; Leu70; Oic74; Nle75; | |
| [Cha]LHKG[Oic][Nle]P[4-Cl—F]{COOH} | 4-Cl—F77]Apelin-7(62-77) | |
| {MeS- | 3-(methylthio)propionyl- | 1023 |
| Propionyl}F[hArg][hArg]Q[hArg]P[hArg] | [hArg63, 64, 66, 68; Cha69; Ile70; Oic74; Nle75; | |
| [Cha]IHKG[Oic][Nle]P[4-Cl—F]{COOH} | 4-Cl—F77]Apelin-17(62-77) | |
| {MeS- | 3-(methylthio)propionyl- | 1024 |
| Propionyl}F[hArg][hArg]Q[hArg]P[hArg] | [hArg63, 64, 66, 68; Cha69; CPG70; Oic74; Nle75; | |
| [Cha][CPG]HKG[Oic][Nle]P[4-Cl—F]{COOH} | 4-Cl—F77]Apelin-17(62-77) | |
| {MeS- | 3-(methylthio)propionyl- | 1025 |
| Propionyl}F[hArg][hArg]Q[hArg]P[hArg] | [hArg63, 64, 66, 68; Cha69; Chg70; Oic74; Nle75; | |
| [Cha][Chg]HKG[Oic][Nle]P[4-Cl—F]{COOH} | 4-Cl—F77]Apelin-17(62-77) | |
| {MeS- | 3-(methylthio)propionyl- | 1026 |
| Propionyl}F[hArg][hArg]Q[hArg]P[hArg] | [hArg63, 64, 66, 68; Cha69, 70; Oic74; Nle75; 4- | |
| [Cha][Cha]HKG[Oic][Nle]P[4-Cl—F]{COOH} | Cl—F77]Apelin-17(62-77) | |
| {MeS- | 3-(methylthio)propionyl- | 1027 |
| Propionyl}F[hArg][hArg]Q[hArg]P[hArg] | [hArg63, 64, 66, 68; Cha69; His70; Oic74; Nle75; | |
| [Cha]HHKG[Oic][Nle]P[4-Cl—F]{COOH} | 4-Cl—F77]Apelin-17(62-77) | |
| {MeS- | 3-(methylthio)propionyl- | 1028 |
| Propionyl}F[hArg][hArg]Q[hArg]P[hArg] | [hArg63, 64, 66, 68; Cha69; Tyr70; Oic74; Nle75; | |
| [Cha]YHKG[Oic][Nle]P[4-Cl—F]{COOH} | 4-Cl—F77]Apelin-17(62-77) | |
| {MeS- | 3-(methylthio)propionyl- | 1029 |
| Propionyl}F[hArg][hArg]Q[hArg]P[hArg] | [hArg63, 64, 66, 68; Cha69; Trp70; Oic74; Nle75; | |
| [Cha]WHKG[Oic][Nle]P[4-Cl—F]{COOH} | 4-Cl—F77]Apelin-17(62-77) | |
| {MeS- | 3-(methylthio)propionyl- | 1030 |
| Propionyl}F[hArg][hArg]Q[hArg]P[hArg] | [hArg63, 64, 66, 68; Cha69; Phe70; Oic74; Nle75; | |
| [Cha]FHKG[Oic][Nle]P[4-Cl—F]{COOH} | 4-Cl—F77]Apelin-17(62-77) | |
| {MeS- | 3-(methylthio)propionyl- | 1031 |
| Propionyl}F[hArg][hArg]Q[hArg]P[hArg] | [hArg63, 64, 66, 68; Cha69; NMePhe70; Oic74; | |
| [Cha][NMePhe]HKG[Oic][Nle]P[4-Cl—F]{COOH} | Nle75; 4-Cl—F77]Apelin-17(62-77) | |
| {MeS- | 3-(methylthio)propionyl- | 1032 |
| Propionyl}F[hArg][hArg]Q[hArg]P[hArg] | [hArg63, 64, 66, 68; Cha69; 1- | |
| [Cha][1-Nal]HKG[Oic][Nle]P[4-Cl—F]{COOH} | Nal70; Oic74; Nle75; 4-Cl—F77]Apelin-17(62-77) | |
| {MeS- | 3-(methylthio)propionyl- | 1033 |
| Propionyl}F[hArg][hArg]Q[hArg]P[hArg] | [hArg63, 64, 66, 68; Cha69; 2- | |
| [Cha][2-Nal]HKG[Oic][Nle]P[4-Cl—F]{COOH} | Nal70; Oic74; Nle75 ; 4-Cl—F77]Apelin-17(62- | |
| | 77) | |
| {MeS- | 3-(methylthio)propionyl- | 1034 |
| Propionyl}F[hArg][hArg]Q[hArg]P[hArg] | [hArg63, 64, 66, 68; Cha69; Bip70; Oic74; Nle75; | |
| [Cha][Bip]HKG[Oic][Nle]P[4-Cl—F]{COOH} | 4-Cl—F77]Apelin-17(62-77) | |
| {MeS- | 3-(methylthio)propionyl- | 1035 |
| Propionyl}F[hArg][hArg]Q[hArg]P[hArg] | [hArg63, 64, 66, 68; Cha69; Igl70; Oic74; Nle75; | |
| [Cha][Igl]HKG[Oic][Nle]P[4-Cl—F]{COOH} | 4-Cl—F77]Apelin-17(62-77) | |
| {MeS- | 3-(methylthio)propionyl- | 1036 |
| Propionyl}F[hArg][hArg]Q[hArg]P[hArg] | [hArg63, 64, 66, 68; Cha69; 4-Cl—F70,77; | |
| [Cha][4-Cl—F]HKG[Oic][Nle]P[4- | Oic74; Nle75]Apelin-17(62-77) | |
| Cl—F]{COOH} | | |
| {MeS- | 3-(methylthio)propionyl- | 1037 |
| Propionyl}F[hArg][hArg]Q[hArg]P[hArg] | [hArg63, 64, 66, 68; Cha69; 4-F—F70; | |
| [Cha][4-F—F]HKG[Oic][Nle]P[4- | Oic74; Nle75; 4-Cl—F77]Apelin-17(62- | |
| Cl—F]{COOH} | 77) | |
| {MeS- | 3-(methylthio)propionyl- | 1038 |
| Propionyl}F[hArg][hArg]Q[hArg]P[hArg] | [hArg63, 64, 66, 68; Cha69; pI- | |
| [Cha][pI-Phe]HKG[Oic][Nle]P[4-Cl—F]{COOH} | Phe70; Oic74; Nle75; 4-Cl—F77]Apelin-17(62- | |
| | 77) | |
| {MeS- | 3-(methylthio)propionyl- | 1039 |
| Propionyl}F[hArg][hArg]Q[hArg]P[hArg] | [hArg63, 64, 66, 68; Cha69; 2Pal70; Oic74; Nle75; | |
| [Cha][2Pal]HKG[Oic][Nle]P[4-Cl—F]{COOH} | 4-Cl—F77]Apelin-17(62-77) | |
| {MeS- | 3-(methylthio)propionyl- | 1040 |
| Propionyl}F[hArg][hArg]Q[hArg]P[hArg] | [hArg63, 64, 66, 68; Cha69; 3Pal70; Oic74; Nle75; | |
| [Cha][3Pal]HKG[Oic][Nle]P[4-Cl—F]{COOH} | 4-Cl—F77]Apelin-17(62-77) | |
| {MeS- | 3-(methylthio)propionyl- | 1041 |
| Propionyl}F[hArg][hArg]Q[hArg]P[hArg] | [hArg63, 64, 66, 68; Cha69; Tic70; Oic74; Nle75; | |
| [Cha][Tic]HKG[Oic][Nle]P[4-Cl—F]{COOH} | 4-Cl—F77]Apelin-17(62-77) | |
| {MeS- | 3-(methylthio)propionyl- | 1042 |
| Propionyl}F[hArg][hArg]Q[hArg]P[hArg] | [hArg63, 64, 66, 68; Cha69; Orn70; Oic74; Nle75; | |
| [Cha][Orn]HKG[Oic][Nle]P[4-Cl—F]{COOH} | 4-Cl—F77]Apelin-17(62-77) | |
| {MeS- | 3-(methylthio)propionyl- | 1043 |
| Propionyl}F[hArg][hArg]Q[hArg]P[hArg] | [hArg63, 64, 66, 68; Cha69; Dab70; Oic74; Nle75; | |
| [Cha][Dab]HKG[Oic][Nle]P[4-Cl—F]{COOH} | 4-Cl—F77]Apelin-17(62-77) | |
| {MeS- | 3-(methylthio)propionyl- | 1044 |
| Propionyl}F[hArg][hArg]Q[hArg]P[hArg] | [hArg63, 64, 66, 68; Cha69; Dap70; Oic74; Nle75; | |
| [Cha][Dap]HKG[Oic][Nle]P[4-Cl—F]{COOH} | 4-Cl—F77]Apelin-17(62-77) | |
| {MeS- | 3-(methylthio)propionyl- | 1045 |
| Propionyl}F[hArg][hArg]Q[hArg]P[hArg] | [hArg63, 64, 66, 68; Cha69; Thr71; Oic74; Nle75; | |
| [Cha]STKG[Oic][Nle]P[4-Cl—F]{COOH} | 4-Cl—F77]Apelin-17(62-77) | |
| {MeS- | 3-(methylthio)propionyl- | 1046 |
| Propionyl}F[hArg][hArg]Q[hArg]P[hArg] | [hArg63, 64, 66, 68; Cha69; Ala71; Oic74; Nle75; | |
| [Cha]SAKG[Oic][Nle]P[4-Cl—F]{COOH} | 4-Cl—F77]Apelin-17(62-77) | |
| {MeS- | 3-(methylthio)propionyl- | 1047 |
| Propionyl}F[hArg][hArg]Q[hArg]P[hArg] | [hArg63, 64, 66, 68; Cha69; Abu71; Oic74; Nle75; | |
| [Cha]S[Abu]KG[Oic][Nle]P[4-Cl—F]{COOH} | 4-Cl—F77]Apelin-17(62-77) | |
| {MeS- | 3-(methylthio)propionyl- | 1048 |
| Propionyl}F[hArg][hArg]Q[hArg]P[hArg] | [hArg63, 64, 66, 68; Cha69; Nle71,75; Oic74; 4- | |
| [Cha]S[Nle]KG[Oic][Nle]P[4-Cl—F]{COOH} | Cl—F77]Apelin-17(62-77) | |
| {MeS- | 3-(methylthio)propionyl- | 1049 |
| Propionyl}F[hArg][hArg]Q[hArg]P[hArg] | [hArg63, 64, 66, 68; Cha69; Nva71; Oic74; Nle75; | |
| [Cha]S[Nva]KG[Oic][Nle]P[4-Cl—F]{COOH} | 4-Cl—F77]Apelin-17(62-77) | |
| {MeS- | 3-(methylthio)propionyl- | 1050 |
| Propionyl}F[hArg][hArg]Q[hArg]P[hArg] | [hArg63, 64, 66, 68; Cha69; Val71; Oic74; Nle75; | |
| [Cha]SVKG[Oic][Nle]P[4-Cl—F]{COOH} | 4-Cl—F77]Apelin-17(62-77) | |
| {MeS- | 3-(methylthio)propionyl- | 1051 |
| Propionyl}F[hArg][hArg]Q[hArg]P[hArg] | [hArg63, 64, 66, 68; Cha69; Gly71; Oic74; Nle75; | |
| [Cha]SGKG[Oic][Nle]P[4-Cl—F]{COOH} | 4-Cl—F77]Apelin-17(62-77) | |
| {MeS- | 3-(methylthio)propionyl- | 1052 |
| Propionyl}F[hArg][hArg]Q[hArg]P[hArg] | [hArg63, 64, 66, 68; Cha69; Leu71; Oic74; Nle75; | |
| [Cha]SLKG[Oic][Nle]P[4-Cl—F]{COOH} | 4-Cl—F77]Apelin-17(62-77) | |
| {MeS- | 3-(methylthio)propionyl- | 1053 |
| Propionyl}F[hArg][hArg]Q[hArg]P[hArg] | [hArg63, 64, 66, 68; Cha69; Ile71; Oic74; Nle75; | |
| [Cha]SIKG[Oic][Nle]P[4-Cl—F]{COOH} | 4-Cl—F77]Apelin-17(62-77) | |
| {MeS- | 3-(methylthio)propionyl- | 1054 |
| Propionyl}F[hArg][hArg]Q[hArg]P[hArg] | [hArg63, 64, 66, 68; Cha69; CPG71; Oic74; Nle75; | |
| [Cha]S[CPG]KG[Oic][Nle]P[4-Cl—F]{COOH} | 4-Cl—F77]Apelin-17(62-77) | |
| {MeS- | 3-(methylthio)propionyl- | 1055 |
| Propionyl}F[hArg][hArg]Q[hArg]P[hArg] | [hArg63, 64, 66, 68; Cha69; Chg71; Oic74; Nle75; | |
| [Cha]S[Chg]KG[Oic][Nle]P[4-Cl—F]{COOH} | 4-Cl—F77]Apelin-17(62-77) | |
| {MeS- | 3-(methylthio)propionyl- | 1056 |
| Propionyl}F[hArg][hArg]Q[hArg]P[hArg] | [hArg63, 64, 66, 68; Cha69, 71; Oic74; Nle75; 4- | |
| [Cha]S[Cha]KG[Oic][Nle]P[4-Cl—F]{COOH} | Cl—F77]Apelin-17(62-77) | |
| {MeS- | 3-(methylthio)propionyl- | 1057 |
| Propionyl}F[hArg][hArg]Q[hArg]P[hArg] | [hArg63, 64, 66, 68; Cha69; Oic74; Nle75; 4- | |
| [Cha]SHKG[Oic][Nle]P[4-Cl—F]{COOH} | Cl—F77]Apelin-17(62-77) | |
| {MeS- | 3-(methylthio)propionyl- | 1058 |
| Propionyl}F[hArg][hArg]Q[hArg]P[hArg] | [hArg63, 64, 66, 68; Cha69; Tyr71; Oic74; Nle75; | |
| [Cha]SYKG[Oic][Nle]P[4-Cl—F]{COOH} | 4-Cl—F77]Apelin-17(62-77) | |
| {MeS- | 3-(methylthio)propionyl- | 1059 |
| Propionyl}F[hArg][hArg]Q[hArg]P[hArg] | [hArg63, 64, 66, 68; Cha69; Trp71; Oic74; Nle75; | |
| [Cha]SWKG[Oic][Nle]P[4-Cl—F]{COOH} | 4-Cl—F77]Apelin-17(62-77) | |
| {MeS- | 3-(methylthio)propionyl- | 1060 |
| Propionyl}F[hArg][hArg]Q[hArg]P[hArg] | [hArg63, 64, 66, 68; Cha69; Phe71; Oic74; Nle75; | |
| [Cha]SFKG[Oic][Nle]P[4-Cl—F]{COOH} | 4-Cl—F77]Apelin-17(62-77) | |
| {MeS- | 3-(methylthio)propionyl- | 1061 |
| Propionyl}F[hArg][hArg]Q[hArg]P[hArg] | [hArg63, 64, 66, 68; Cha69; NMePhe71; Oic74; | |
| [Cha]S[NMePhe]KG[Oic][Nle]P[4-Cl—F]{COOH} | Nle75; 4-Cl—F77]Apelin-17(62-77) | |
| {MeS- | 3-(methylthio)propionyl- | 1062 |
| Propionyl}F[hArg][hArg]Q[hArg]P[hArg] | [hArg63, 64, 66, 68; Cha69; 1- | |
| [Cha]S[1-Nal]KG[Oic][Nle]P[4-Cl—F]{COOH} | Nal71; Oic74; Nle75; 4-Cl—F77]Apelin-17(62- | |
| | 77) | |
| {MeS- | 3-(methylthio)propionyl- | 1063 |
| Propionyl}F[hArg][hArg]Q[hArg]P[hArg] | [hArg63, 64, 66, 68; Cha69; 2- | |
| [Cha]S[2-Nal]KG[Oic][Nle]P[4-Cl—F]{COOH} | Nal71; Oic74; Nle75; 4-Cl—F77]Apelin-17(62- | |
| | 77) | |
| {MeS- | 3-(methylthio)propionyl- | 1064 |
| Propionyl}F[hArg][hArg]Q[hArg]P[hArg] | [hArg63, 64, 66, 68; Cha69; Bip71; Oic74; Nle75; | |
| [Cha]S[Bip]KG[Oic][Nle]P[4-Cl—F]{COOH} | 4-Cl—F77]Apelin-17(62-77) | |
| {MeS- | 3-(methylthio)propionyl- | 1065 |
| Propionyl}F[hArg][hArg]Q[hArg]P[hArg] | [hArg63, 64, 66, 68; Cha69; Igl71; Oic74; Nle75; | |
| [Cha]S[Igl]KG[Oic][Nle]P[4-Cl—F]{COOH} | 4-Cl—F77]Apelin-17(62-77) | |
| {MeS- | 3-(methylthio)propionyl- | 1066 |
| Propionyl}F[hArg][hArg]Q[hArg]P[hArg] | [hArg63, 64, 66, 68; Cha69; 4- | |
| [Cha]S[4-Cl—F]KG[Oic][Nle]P[4-Cl—F]{COOH} | Cl—F71,77; Oic74; Nle75]Apelin-17(62-77) | |
| {MeS- | 3-(methylthio)propionyl- | 1067 |
| Propionyl}F[hArg][hArg]Q[hArg]P[hArg] | [hArg63, 64, 66, 68; Cha69; 4- | |
| [Cha]S[4-F—F]KG[Oic][Nle]P[4-Cl—F]{COOH} | F—F71; Oic74; Nle75; 4-Cl—F77]Apelin-17(62- | |
| | 77) | |
| {MeS- | 3-(methylthio)propionyl- | 1068 |
| Propionyl}F[hArg][hArg]Q[hArg]P[hArg] | [hArg63, 64, 66, 68; Cha69; 4- | |
| [Cha]S[4-I—F]KG[Oic][Nle]P[4-Cl—F]{COOH} | I—F71; Oic74; Nle75; 4-Cl—F77]Apelin-17(62- | |
| | 77) | |
| {MeS- | 3-(methylthio)propionyl- | 1069 |
| Propionyl}F[hArg][hArg]Q[hArg]P[hArg] | [hArg63, 64, 66, 68; Cha69; 2Pal71; Oic74; Nle75; | |
| [Cha]S[2Pal]KG[Oic][Nle]P[4-Cl—F]{COOH} | 4-Cl—F77]Apelin-17(62-77) | |
| {MeS- | 3-(methylthio)propionyl- | 1070 |
| Propionyl}F[hArg][hArg]Q[hArg]P[hArg] | [hArg63, 64, 66, 68; Cha69; 3Pal71; Oic74; Nle75; | |
| [Cha]S[3Pal]KG[Oic][Nle]P[4-Cl—F]{COOH} | 4-Cl—F77]Apelin-17(62-77) | |
| {MeS- | 3-(methylthio)propionyl- | 1071 |
| Propionyl}F[hArg][hArg]Q[hArg]P[hArg] | [hArg63, 64, 66, 68; Cha69; Tic71; Oic74; Nle75; | |
| [Cha]S[Tic]KG[Oic][Nle]P[4-Cl—F]{COOH} | 4-Cl—F77]Apelin-17(62-77) | |
| {MeS- | 3-(methylthio)propionyl- | 1072 |
| Propionyl}F[hArg][hArg]Q[hArg]P[hArg] | [hArg63, 64, 66, 68; Cha69; Orn71; Oic74; Nle75; | |
| [Cha]S[Orn]KG[Oic][Nle]P[4-Cl—F]{COOH} | 4-Cl—F77]Apelin-17(62-77) | |
| {MeS- | 3-(methylthio)propionyl- | 1073 |
| Propionyl}F[hArg][hArg]Q[hArg]P[hArg] | [hArg63, 64, 66, 68; Cha69; Dab71; Oic74; Nle75; | |
| [Cha]S[Dab]KG[Oic][Nle]P[4-Cl—F]{COOH} | 4-Cl—F77]Apelin-17(62-77) | |
| {MeS- | 3-(methylthio)propionyl- | 1074 |
| Propionyl}F[hArg][hArg]Q[hArg]P[hArg] | [hArg63, 64, 66, 68; Cha69; Dap71; Oic74; Nle75; | |
| [Cha]S[Dap]KG[Oic][Nle]P[4-Cl—F]{COOH} | 4-Cl—F77]Apelin-17(62-77) | |
| {MeS- | 3-(methylthio)propionyl- | 1076 |
| Propionyl}F[hArg][hArg]Q[hArg]P[hArg] | [hArg63, 64, 66, 68; Cha69; Nle72,75; Oic74; 4- | |
| [Cha]SH[Nle] G[Oic][Nle]P[4-Cl—F]{COOH} | Cl—F77]Apelin-17(62-77) | |
| {MeS- | 3-(methylthio)propionyl- | 1077 |
| Propionyl}F[hArg][hArg]Q[hArg]P[hArg] | [hArg63, 64, 66, 68; Cha69; Nva72; Oic74; Nle75; | |
| [Cha]SH[Nva]G[Oic][Nle]P[4-Cl—F]{COOH} | 4-Cl—F77]Apelin-17(62-77) | |
| {MeS- | 3-(methylthio)propionyl- | 1078 |
| Propionyl}F[hArg][hArg]Q[hArg]P[hArg] | [hArg63, 64, 66, 68; Cha69; Val72; Oic74; Nle75; | |
| [Cha]SHVG[Oic][Nle]P[4-Cl—F]{COOH} | 4-Cl—F77]Apelin-17(62-77) | |
| {MeS- | 3-(methylthio)propionyl- | 1079 |
| Propionyl}F[hArg][hArg]Q[hArg]P[hArg] | [hArg63, 64, 66, 68; Cha69; Gly72; Oic74; Nle75; | |
| [Cha]SHGG[Oic][Nle]P[4-Cl—F]{COOH} | 4-Cl—F77]Apelin-17(62-77) | |
| {MeS- | 3-(methylthio)propionyl- | 1080 |
| Propionyl}F[hArg][hArg]Q[hArg]P[hArg] | [hArg63, 64, 66, 68; Cha69; CPG72; Oic74; Nle75; | |
| [Cha]SH[CPG]G[Oic][Nle]P[4-Cl—F]{COOH} | 4-Cl—F77]Apelin-17(62-77) | |
| {MeS- | 3-(methylthio)propionyl- | 1081 |
| Propionyl}F[hArg][hArg]Q[hArg]P[hArg] | [hArg63, 64, 66, 68; Cha69; Chg72; Oic74; Nle75; | |
| [Cha]SH[Chg]G[Oic][Nle]P[4-Cl—F]{COOH} | 4-Cl—F77]Apelin-17(62-77) | |
| {MeS- | 3-(methylthio)propionyl- | 1082 |
| Propionyl}F[hArg][hArg]Q[hArg]P[hArg] | [hArg63, 64, 66, 68; Cha69, 72; Oic74; Nle75; 4- | |
| [Cha]SH[Cha]G[Oic][Nle]P[4-Cl—F]{COOH} | Cl—F77]Apelin-17(62-77) | |
| {MeS- | 3-(methylthio)propionyl- | 1083 |
| Propionyl}F[hArg][hArg]Q[hArg]P[hArg] | [hArg63, 64, 66, 68; Cha69; Trp72; Oic74; Nle75; | |
| [Cha]SHWG[Oic][Nle]P[4-Cl—F]{COOH} | 4-Cl—F77]Apelin-17(62-77) | |
| {MeS- | 3-(methylthio)propionyl- | 1084 |
| Propionyl}F[hArg][hArg]Q[hArg]P[hArg] | [hArg63, 64, 66, 68; Cha69; 1- | |
| [Cha]SH[1-Nal]G[Oic][Nle]P[4-Cl—F]{COOH} | Nal72; Oic74; Nle75; 4-Cl—F77]Apelin-17(62- | |
| | 77) | |
| {MeS- | 3-(methylthio)propionyl- | 1085 |
| Propionyl}F[hArg][hArg]Q[hArg]P[hArg] | [hArg63, 64, 66, 68; Cha69; 2- | |
| [Cha]SH[2-Nal]G[Oic][Nle]P[4-Cl—F]{COOH} | Nal72; Oic74; Nle75; 4-Cl—F77]Apelin-17(62- | |
| | 77) | |
| {MeS- | 3-(methylthio)propionyl- | 1086 |
| Propionyl}F[hArg][hArg]Q[hArg]P[hArg] | [hArg63, 64, 66, 68; Cha69; Bip72; Oic74; Nle75; | |
| [Cha]SH[Bip]G[Oic][Nle]P[4-Cl—F]{COOH} | 4-Cl—F77]Apelin-17(62-77) | |
| {MeS- | 3-(methylthio)propionyl- | 1087 |
| Propionyl}F[hArg][hArg]Q[hArg]P[hArg] | [hArg63, 64, 66, 68; Cha69; Igl72; Oic74; Nle75; | |
| [Cha]SH[Igl]G[Oic][Nle]P[4-Cl—F]{COOH} | 4-Cl—F77]Apelin-17(62-77) | |
| {MeS- | 3-(methylthio)propionyl- | 1088 |
| Propionyl}F[hArg][hArg]Q[hArg]P[hArg] | [hArg63, 64, 66, 68; Cha69; 4- | |
| [Cha]SH[4-Cl—F]G[Oic][Nle]P[4-Cl—F]{COOH} | Cl—F72,77; Oic74; Nle75]Apelin-17(62-77) | |
| {MeS- | 3-(methylthio)propionyl- | 1089 |
| Propionyl}F[hArg][hArg]Q[hArg]P[hArg] | [hArg63, 64, 66, 68; Cha69; 4- | |
| [Cha]SH[4-F—F]G[Oic][Nle]P[4-Cl—F]{COOH} | F—F72; Oic74; Nle75; 4-Cl—F77]Apelin-17(62- | |
| | 77) | |
| {MeS- | 3-(methylthio)propionyl- | 1090 |
| Propionyl}F[hArg][hArg]Q[hArg]P[hArg] | [hArg63, 64, 66, 68; Cha69; pI- | |
| [Cha]SH[pI-Phe]G[Oic][Nle]P[4-Cl—F]{COOH} | Phe72; Oic74; Nle75; 4-Cl—F77]Apelin-17(62- | |
| | 77) | |
| {MeS- | 3-(methylthio)propionyl- | 1091 |
| Propionyl}F[hArg][hArg]Q[hArg]P[hArg] | [hArg63, 64, 66, 68; Cha69; 2Pal72; Oic74; Nle75; | |
| [Cha]SH[2Pal]G[Oic][Nle]P[4-Cl—F]{COOH} | 4-Cl—F77]Apelin-17(62-77) | |
| {MeS- | 3-(methylthio)propionyl- | 1092 |
| Propionyl}F[hArg][hArg]Q[hArg]P[hArg] | [hArg63, 64, 66, 68; Cha69; 3Pal72; Oic74; Nle75; | |
| [Cha]SH[3Pal]G[Oic][Nle]P[4-Cl—F]{COOH} | 4-Cl—F77]Apelin-17(62-77) | |
| {MeS- | 3-(methylthio)propionyl- | 1093 |
| Propionyl}F[hArg][hArg]Q[hArg]P[hArg] | [hArg63, 64, 66, 68; Cha69; Orn72; Oic74; Nle75; | |
| [Cha]SH[Orn]G[Oic][Nle]P[4-Cl—F]{COOH} | 4-Cl—F77]Apelin-17(62-77) | |
| {MeS- | 3-(methylthio)propionyl- | 1094 |
| Propionyl}F[hArg][hArg]Q[hArg]P[hArg] | [hArg63, 64, 66, 68; Cha69; Dab72; Oic74; Nle75; | |
| [Cha]SH[Dab]G[Oic][Nle]P[4-Cl—F]{COOH} | 4-Cl—F77]Apelin-17(62-77) | |
| {MeS- | 3-(methylthio)propionyl- | 1095 |
| Propionyl}F[hArg][hArg]Q[hArg]P[hArg] | [hArg63, 64, 66, 68; Cha69; Dap72; Oic74; Nle75; | |
| [Cha]SH[Dap]G[Oic][Nle]P[4-Cl—F]{COOH} | 4-Cl—F77]Apelin-17(62-77) | |

[0403] Additional numbered embodiments are shown below.

[0404] 73. The isolated polypeptide of Embodiment 69, wherein X₋₄, X₋₃, X₋₂, X₋₁, X₁, X₂ or X₁₃ are replaced with Z.

[0405] 74. The isolated polypeptide of Embodiment 69, wherein Z, or any of X₋₄-X₁₃ includes a PEG derivative or serum half-life prolonging group covalently attached via a linker or attached with no linker.

[0406] 75. An APJ agonist having an amino acid sequence selected from the group of sequences consisting of SEQ ID NOs: 1096-1240. Table 9 shows examples of embodiments 73-75. The examples can include a PEG derivative or serum half-life prolonging group. In the table, the free acid can be a carboxylic acid and the amide can be at the C-terminus

TABLE 9

| | | SEQ |
|---|---|---|
| | | ID |
| AMINO ACID SEQUENCE | DESIGNATION | NO. |
| {Acetyl}[Atz(PEG10)],GGLRP[hArg][NMeLeu] | Ac-Atz(PEG10)-Gly-Gly-[Leu65;hArg68; | 1096 |
| SHKGP[Nle]P[4-Cl-F]{FreeAcid} | NMeLeu69;Nle75;4-Cl-F77]Apelin-13(65-77) | |
| {Acetyl}[Atz(PEG10)],GLRP[hArg][NMeLeu] | Ac-Atz(PEG10)-Gly-[Leu65;hArg68;NMeLeu69; | 1097 |
| SHKGP[Nle]P[4-Cl-F]{FreeAcid} | Nle75;4-Cl-F77]Apelin-13(65-77) | |
| {Acetyl}[Atz(PEG10)],LRP[hArg][NMeLeu] | Ac-Atz(PEG10)-[Leu65;hArg68;NMeLeu69; | 1098 |
| SHKGP[Nle]P[4-Cl-F]{FreeAcid} | Nle75;4-Cl-F77]Apelin-13(65-77) | |
| {Hydrogen}[PE][Atz(PEG10)],P[hArg][NMeLeu] | [PE65;Atz(PEG10)66;hArg68;NMeLeu69; | 1099 |
| SHKGP[Nle]P[4-Cl-F]{FreeAcid} | Nle75;4-Cl-F77]Apelin-13(65-77) | |
| {Hydrogen}[PE]R[Atz(PEG10)],[hArg][NMeLeu] | [PE65;Atz(PEG10)67;hArg68;NMeLeu69; | 1100 |
| SHKGP[Nle]P[4-Cl-F]{FreeAcid} | Nle75;4-Cl-F77]Apelin-13(65-77) | |
| {Hydrogen}[PE]RP[Atz(PEG10)][NMeLeu] | [PE65;Atz(PEG10)68;NMeLeu69;Nle75; | 1101 |
| SHKGP[Nle]P[4-Cl-F]{FreeAcid} | 4-Cl-F77]Apelin-13(65-77) | |
| {Hydrogen}[PE]RP[hArg][Atz(PEG10)] | [PE65;hArg68;Atz(PEG10)69;Nle75;4-Cl-F77] | 1102 |
| SHKGP[Nle]P[4-Cl-F]{FreeAcid} | Apelin-13(65-77) | |
| {Hydrogen}[PE]RP{hArg][NMeLeu][Atz(PEG10) | [PE65;hArg68;NMeLeu69;Atz(PEG10)70; | 1103 |
| HKGP[Nle]P[4-Cl-F]{FreeAcid} | Nle75;4-Cl-F77]Apelin-13(65-77) | |
| {Hydrogen}[PE]RP]hArg][NMeLeu]S | [PE65;hArg68;NMeLeu69;Atz(PEG10)71; | 1104 |
| [Atz(PEG10)]KGP[Nle]P[4-Cl-F]{FreeAcid} | Nle75;4-Cl-F77]Apelin-13(65-77) | |
| {Hydrogen}[PE]RP[hArg][NMeLeu]SH | [PE65;hArg68;NMeLeu69;Atz(PEG10)72; | 1105 |
| [Atz(PEG10)]GP[Nle]P[4-Cl-F]{FreeAcid} | Nle75;4-Cl-F77]Apelin-13(65-77) | |
| {Hydrogen}[PE]RP[hArg][NMeLeu]SHK | [PE65;hArg68;NMeLeu69;Atz(PEG10)73; | 1106 |
| [Atz(PEG10)]P[Nle]P[4-Cl-F]{FreeAcid} | Nle75;4-Cl-F77]Apelin-13(65-77) | |
| {Hydrogen}[PE]RP[hArg][NMeLeu]SHKGP | [PE65;hArg68;NMeLeu69;Atz(PEG10)75; | 1107 |
| [Atz(PEG10)]P[4-Cl-F]{FreeAcid} | 4-Cl-F77]Apelin-13(65-77) | |
| {Hydrogen}[PE]RP[hArg][NMeLeu]SHKGP | [PE65;hArg68;NMeLeu69;Nle75;Atz(PEG10)76; | 1108 |
| [Nle][Atz(PEG10)][4-Cl-F]{FreeAcid} | 4-Cl-F77]Apelin-13(65-77) | |
| [Hydrogen}[PE]RP[hArg][NMeLeu]SHKGP | [PE65;hArg68;NMeLeu69;Nle75;Atz(PEG10)77] | 1109 |
| [Nle]P[Atz(PEG10)],{Amide} | Apelin-13(65-77)-amide | |
| {Hydrogen}[PE]RP[hArg][NMeLeu]SHKGP | [PE65;hArg68;NMeLeu69;Nle75;4-Cl-F77] | 1110 |
| [Nle]P[4-Cl-F][Atz(PEG10)],{Amide} | Apelin-13(65-77)-Atz(PEG10)-amide | |
| {Hydrogen}[PE]RP[hArg][NMeLeu]SHKGP | [PE65;hArg68;NMeLeu69;Nle75;4-Cl-F77] | 1111 |
| [Nle]P[4-Cl-F]G[Atz(PEG10)],{Amide} | Apelin-13(65-77)-Gly-Atz(PEG10)-amide | |
| {Hydrogen}[PE]RP[hArg][NMeLeu]SHKGP | [PE65;hArg68;NMeLeu69;Nle75;4-Cl-F77] | 1112 |
| [Nle]P[4-Cl-F]GG[Atz(PEG10)],{Amide} | Apelin-13(65-77)-Gly-Gly-Atz(PEG10)-amide | |
| {Acetyl}[Atz(PEG10)],GGLRP[hArg] | Ac-Atz(PEG10)-[Gly65,66,75;Leu67;Pro69; | 1113 |
| [Cha]SHKGP[Nle]f{FreeAcid} | hArg70;Cha71;Ser72;His73;Lys74;Nle77] | |
| | Apelin-13(65-77)-D-Phe | |
| {Acetyl}[Atz(PEG10)],GLRP[hArg] | Ac-[Atz(PEG10)65;Gly66,75;Leu67;Pro69; | 1114 |
| [Cha]SHKGP[Nle]f{FreeAcid} | hArg70;Cha71;Ser72;His73;Lys74;Nle77] | |
| | Apelin-13(65-77)-D-Phe | |
| {Acetyl}[Atz(PEG10)],LRP[hArg] | Ac-Atz(PEG10)-[Leu65;hArg68;Cha69; | 1115 |
| [Cha]SHKGP[Nle]f{FreeAcid} | Nle75;D-Phe76]Apelin-13(65-76) | |
| {Acetyl}[Atz(PEG10)],RP[hArg][Cha] | Ac-[Atz(PEG10)65;hArg68;Cha69;Nle75; | 1116 |
| SHKGP[Nle]f{FreeAcid} | D-Phe76]Apelin-13(65-76) | |
| {Hydrogen}[PE][Atz(PEG10)],P[hArg] | [PE65;Atz(PEG10)66;hArg68;Cha69;Nle75; | 1117 |
| [Cha]SHKGP[Nle]f{FreeAcid} | D-Phe76]Apelin-13(65-76) | |
| {Hydrogen}[PE]R[Atz(PEG10)],[hArg] | [PE65;Atz(PEG10)67;hArg68;Cha69;Nle75; | 1118 |
| [Cha]SHKGP[Nle]f{FreeAcid} | D-Phe76]Apelin-13(65-76) | |
| {Hydrogen}[PE]RP[Atz(PEG10)],[Cha] | [PE65;Atz(PEG10)68;Cha69;Nle75;D-Phe76] | 1119 |
| SHKGP[Nle]f{FreeAcid} | Apelin-13(65-76) | |
| {Hydrogen}[PE]RP[hArg][Atz(PEG10)], | [PE65;hArg68;Atz(PEG10)69;Nle75;D-Phe76] | 1120 |
| SHKGP[Nle]f{FreeAcid} | Apelin-13(65-76) | |
| {Hydrogen}[PE]RP[hArg][Cha][Atz(PEG10)], | [PE65;hArg68;Cha69;Atz(PEG10)70;Nle75; | 1121 |
| HKGP[Nle]f{FreeAcid} | D-Phe76]Apelin-13(65-76) | |
| {Hydrogen}[PE]RP[Cha]S[Atz(PEG10)], | [PE65;hArg68;Cha69;Atz(PEG10)71;Nle75; | 1122 |
| KGP[Nle]f{FreeAcid} | D-Phe76]Apelin-13(65-76) | |
| {Hydrogen}[PE]RP[hArg][Cha]SH | [PE65;hArg68;Cha69;Atz(PEG10)72;Nle75; | 1123 |
| [Atz(PEG10)],GP[Nle]f{FreeAcid} | D-Phe76]Apelin-13(65-76) | |
| {Hydrogen}[PE]RP[hArg][Cha]SHK | [PE65;hArg68;Cha69;Atz(PEG10)73;Nle75; | 1124 |
| [Atz(PEG10)],P[Nle]f{FreeAcid} | D-Phe76]Apelin-13(65-76) | |
| {Hydrogen}[PE]RP[hArg][Cha]SHKG | [PE65;hArg68;Cha69;Atz(PEG10)74;Nle75; | 1125 |
| [Atz(PEG10)],[Nle]f{FreeAcid} | D-Phe76]Apelin-13(65-76) | |
| {Hydrogen}[PE]RP[hArg][Cha]SHKGP | [PE65;hArg68;Cha69;Atz(PEG10)75;D-Phe76] | 1126 |
| [Atz(PEG10)],f{FreeAcid} | Apelin-13(65-76) | |
| {Hydrogen}[PE]RP[hArg][Cha]SHKGP | [PE65;hArg68;Cha69;Nle75;Atz(PEG10)76] | 1127 |
| [Nle][Atz(PEG10)],{Amide} | Apelin-13(65-76)-amide | |
| {Hydrogen}[PE]RP[hArg][Cha]SHKGP | [PE65;hArg68;Cha69;Nle75;D-Phe76; | 1128 |
| [Nle]f[Atz(PEG10)],{Amide} | Atz(PEG10)77]Apelin-13(65-77)-amide | |
| {Hydrogen}[PE]RP[hArg][Cha]SHKGP | [PE65;hArg68;Cha69;Nle75;D-Phe76;Gly77] | 1129 |
| [Nle]fG[Atz(PEG10)],{Amide} | Apelin-13(65-77)-Atz(PEG10)-amide | |
| {Hydrogen}[PE]RP[hArg][Cha]SHKGP | [PE65;hArg68;Cha69;Nle75;D-Phe76;Gly77] | 1130 |
| [Nle]fGG[Atz(PEG10)],{Amide} | Apelin-13(65-77)-Gly-Atz(PEG10)-amide | |
| [Acetyl}[Atz(PEG10)]LRP[NMeLeu][Atz | Ac-Atz(PEG10)-[Leu65;hArg68;NMeLeu69; | 1131 |
| (PEG10)]HKGP[Nle][4-Cl-F]{FreeAcid} | Atz(PEG10)70;Nle75;4-Cl-F76]Apelin-13(65-76) | |
| {Hydrogen}[PE]RP[hArg][Cha][Atz(PEG10)] | [PE65;hArg68;Cha69;Atz(PEG10)70;Nle75; | 1132 |
| HKGP[Nle][4-Cl-F]{FreeAcid} | 4-Cl-F76]Apelin-13(65-76) | |
| {Hydrogen}[PE]RP[hArg][Cha][Atz(PEG10)] | [PE65;hArg68;Cha69;Atz(PEG10)70;Oic74; | 1133 |
| HKG[Oic][Nle][4-Cl-F]{FreeAcid} | Nle75;4-Cl-F76]Apelin-13(65-76) | |
| {Hydrogen}[PE]RP[hArg][Cha][Atz(PEG10)] | [PE65;hArg68;Cha69;Atz(PEG10)70;Oic74; | 1134 |
| HKG[Oic][Nle][4-Cl-F]{Amide} | Nle75;4-Cl-F76]Apelin-13(65-76)-amide | |
| {Hydrogen}[PE]RP[hArg][Cha]F[Atz(PEG10)] | [PE65;hArg68;Cha69;Phe70;Atz(PEG10)71; | 1135 |
| KG[Oic][Nle][4-Cl-F]{FreeAcid} | Oic74;Nle75;4-Cl-F76]Apelin-13(65-76) | |
| {Hydrogen}[PE]RP[hArg][Cha]F[Atz(PEG10)] | [PE65;hArg68;Cha69;Phe70;Atz(PEG10)71; | 1136 |
| KG[Oic][Nle][4-Cl-F]{Amide} | Oic74;Nle75;4-Cl-F76]Apelin-13(65-76)-amide | |
| {Hydrogen}[PE]RP[NMeLeu]F[Atz(PEG10)] | [PE65;hArg68;NMeLeu69;Phe70;Atz(PEG10) | 1137 |
| KG[Oic][Nle][4-Cl-F]{FreeAcid} | 71;Oic74;Nle75;4-Cl-F76]Apelin-13(65-76) | |
| {Hydrogen}[PE]RP[hArg][NMeLeu]F | [PE65;hArg68;NMeLeu69;Phe70;Atz(PEG10)71; | 1138 |
| [Atz(PEG10)]KG[Oic][Nle][4-Cl-F]{Amide} | Oic74;Nle75;4-Cl-F76]Apelin-13(65-76)-amide | |
| {Hydrogen}[PE]RP[hArg][NMeLeu][Atz(PEG10)] | [PE65;hArg68;NMeLeu69;Atz(PEG10)70; | 1139 |
| HKGP[Nle][4-Cl-F]{FreeAcid} | Nle75;4-Cl-F76]Apelin-13(65-76) | |
| {Hydrogen}[PE]RP[hArg][NMeLeu][Atz(PEG10)] | [PE65;hArg68;NMeLeu69;Atz(PEG10)70; | 1140 |
| HKG[Oic][Nle][4-Cl-F]{FreeAcid} | Oic74;Nle75;4-Cl-F76]Apelin-13(65-76) | |
| {Hydrogen}[PE]RP[hArg][NMeLeu][Atz(PEG10)] | [PE65;hArg68;NMeLeu69;Atz(PEG10)70; | 1141 |
| HKG[Oic][Nle][4-Cl-F]{Amide} | Oic74;Nle75;4-Cl-F76]Apelin-13(65-76)-amide | |
| {Acetyl}[Atz(PEG10)]LRP[hArg][NMeLeu] | Ac-Atz(PEG10)-[Leu65;hArg68;NMeLeu69;Atz | 1142 |
| [Atz(PEG10)]HKGP[Nle]f{FreeAcid} | (PEG10)70;Nle75;D-Phe76]Apelin-13(65-76) | |
| {Hydrogen}[PE]RP[hArg][Cha][Atz(PEG10)] | [PE65;hArg68;Cha69;Atz(PEG10)70;Nle75; | 1143 |
| HKGP[Nle]f{FreeAcid} | D-Phe76]Apelin-13(65-76) | |
| {Hydrogen}[PE]RP[hArg][Cha][Atz(PEG10)] | [PE65;hArg68;Cha69;Atz(PEG10)70;Oic74; | 1144 |
| HKG[Oic][Nle]f{FreeAcid} | Nle75;D-Phe76]Apelin-13(65-76) | |
| {Hydrogen}[PE]RP[hArg][Cha]F[Atz(PEG10)] | [PE65;hArg68;Cha69;Phe70;Atz(PEG10)71; | 1145 |
| KGP[Nle]f{FreeAcid} | Nle75;D-Phe76]Apelin-13(65-76) | |
| {Hydrogen}[PE]RP[hArg][Cha]F[Atz(PEG10)] | [PE65;hArg68;Cha69;Phe70;Atz(PEG10)71; | 1146 |
| KG[Oic][Nle]f{FreeAcid} | Oic74;Nle75;D-Phe76]Apelin-13(65-76) | |
| {Hydrogen}[PE]RP[hArg][Cha]F[Atz(PEG10)] | [PE65;hArg68;Cha69;Phe70;Atz(PEG10)71; | 1147 |
| KGP[Nle]f{Amide} | Nle75;D-Phe76]Apelin-13(65-76)-amide | |
| {Hydrogen}[PE]RP[hArg][Cha]F[Atz(PEG10)] | [PE65;hArg68;Cha69;Phe70;Atz(PEG10)71; | 1148 |
| KG[Oic][Nle]f{Amide} | Oic74;Nle75;D-Phe76]Apelin-13(65-76)-amide | |
| {Hydrogen}[PE]RP[hArg][NMeLeu] | [PE65;hArg68;NMeLeu69;Phe70;Atz(PEG10) | 1149 |
| F[Atz(PEG10)]KGP[Nle]f{FreeAcid} | 71;Nle75;D-Phe76]Apelin-13(65-76) | |
| {Hydrogen}[PE]RP[hArg][NMeLeu] | [PE65;hArg68;NMeLeu69;Phe70;Atz(PEG10) | 1150 |
| F[Atz(PEG10)]KG[Oic][Nle]f{FreeAcid} | 71;Oic74;Nle75;D-Phe76]Apelin-13(65-76) | |
| {Hydrogen}[PE]RP[hArg][NMeLeu] | [PE65;hArg68;NMeLeu69;Phe70;Atz(PEG10) | 1151 |
| F[Atz(PEG10)]KGP[Nle]f{Amide} | 71;Nle75;D-Phe76]Apelin-13(65-76)-amide | |
| {Hydrogen}[PE]RP[hArg][NMeLeu] | [PE65;hArg68;NMeLeu69;Phe70;Atz(PEG10)71; | 1152 |
| F[Atz(PEG10)]KG[Oic][Nle]f{Amide} | Oic74;Nle75;D-Phe76]Apelin-13(65-76)-amide | |
| {Hydrogen}[PE]RP[hArg][NMeLeu] | [PE65;hArg68;NMeLeu69;Atz(PEG10)70; | 1153 |
| [Atz(PEG10)]HKGP[Nle]f{FreeAcid} | Nle75;D-Phe76]Apelin-13(65-76) | |
| {Hydrogen}[PE]RP[hArg][NMeLeu] | [PE65;hArg68;NMeLeu69;Atz(PEG10)70; | 1155 |
| [Atz(PEG10)]HKG[Oic][Nle]f{FreeAcid} | Oic74;Nle75;D-Phe76]Apelin-13(65-76) | |
| {Hydrogen}[PE]RP[hArg][NMeLeu][Atz | [PE65;hArg68;NMeLeu69;[Atz(20K-mPEG)]70; | 1156 |
| (20K-mPEG)]HKG[Oic][Nle][4-Cl-F]{FreeAcid} | Oic74;Nle75;4-Cl-F76]Apelin-13(65-76) | |
| {Hydrogen}[PE]RP[hArg][Cha][Atz | [PE65;hArg68;Cha69;[Atz(20K-mPEG)]70; | 1157 |
| (20K-mPEG)][Oic][Nle][4-Cl-F]{FreeAcid} | Oic74;Nle75;4-Cl-F76]Apelin-13(65-76) | |
| {Hydrogen}[PE]RP[hArg][NMeLeu]F | [PE65;hArg68;NMeLeu69;Phe70;] | 1158 |
| [Atz(20K-mPEG)]KG[Oic][Nle]f{FreeAcid} | Atz(20K-mPEG)]71;Oic74;Nle75;D-Phe76] | |
| | Apelin-13(65-76) | |
| {Acetyl}[Atz(20K-mPEG)]LRP[hArg][Cha] | [Ac-Atz(20K-mPEG)64;hArg68;Cha69;Nle75; | 1159 |
| SHKGP[Nle][D-1Nal]{FreeAcid} | D-1-Nal76]Apelin-13(64-76) | |
| {Acetyl}[Atz(20K-mPEG)][Ahx]LRP[hArg] | [Ac-Atz(20K-mPEG)63;Ahx64;hArg68;Cha69; | 1160 |
| [Cha]SHKGP[Nle][D-1Nal]{FreeAcid} | Nle75;D-1-Nal76]Apelin-13(63-76) | |
| {Acetyl}[Atz(PEG10)]LRP[hArg][NMeLeu] | Ac-Atz(PEG10)-[Leu65;hArg68;NMeLeu69; | 1161 |
| [Atz(PEG10)]HKGP[Nle]P[4-Cl-F]{FreeAcid} | Atz(PEG10)70;Nle75;4-Cl-F77]Apelin-13(65-77) | |
| {Hydrogen}[PE]RP[hArg][Cha][Atz(PEG10)] | [PE65;hArg68;Cha69;Atz(PEG10)70;Nle75; | 1162 |
| HKGP[Nle]P[4-Cl-F]{FreeAcid} | 4-Cl-F77]Apelin-13(65-77) | |
| {Hydrogen}[PE]RP[hArg][Cha][Atz(PEG10)] | [PE65;hArg68;Cha69;Atz(PEG10)70;Oic74; | 1163 |
| HKG[Oic][Nle]P[4-Cl-F]{FreeAcid} | Nle75;4-Cl-F77]Apelin-13(65-77) | |
| {Hydrogen}[PE]RP[hArg][Cha][Atz(PEG10)] | [PE65;hArg68;Cha69;Atz(PEG10)70;Oic74; | 1164 |
| HKG[Oic][Nle]P[4-Cl-F]{Amide] | Nle75;4-Cl-F77]Apelin-13(65-77)-amide | |
| {Hydrogen}[PE]RP[hArg][NMeLeu][Atz(PEG10)] | [PE65;hArg68;NMeLeu69;Atz(PEG10)70; | 1165 |
| HKGP[Nle]P[4-Cl-F]{FreeAcid} | Nle75;4-Cl-F77]Apelin-13(65-77) | |
| {Hydrogen}[PE]RP[hArg][NMeLeu][Atz(PEG10)] | [PE65;hArg68;NMeLeu69;Atz(PEG10)70; | 1166 |
| HKG[Oic][Nle]P[4-Cl-F]{FreeAcid} | Oic74;Nle75;4-Cl-F77]Apelin-13(65-77) | |
| {Hydrogen}[PE]RP[hArg][NMeLeu][Atz(PEG10)] | [PE65;hArg68;NMeLeu69;Atz(PEG10)70; | 1167 |
| HKG[Oic][Nle]P[4-Cl-F]{Amide} | Oic74;Nle75;4-Cl-F77]Apelin-13(65-77)-amide | |
| {Hydrogen}[PE]RP[hArg][Cha][Atz(1K-mPEG)] | [PE65;hArg68;Cha69;Atz(1K-mPEG)70; | 1168 |
| HKG[Oic][Nle]P[4-Cl-F]{FreeAcid} | Oic74;Nle75;4-Cl-F77]Apelin-13(65-77) | |
| {Hydrogen}[PE]RP[hArg][Cha][Atz(2K-mPEG)] | [PE65;hArg68;Cha69;Atz(2K-mPEG)70; | 1169 |
| HKG[Oic][Nle]P[4-Cl-F]{FreeAcid} | Oic74;Nle75;4-Cl-F77]Apelin-13(65-77) | |
| {Hydrogen}[PE]RP[hArg][Cha][Atz(5K-mPEG)] | [PE65;hArg68;Cha69;Atz(5K-mPEG)70; | 1170 |
| HKG[Oic][Nle]P[4-Cl-F]{FreeAcid} | Oic74;Nle75;4-Cl-F77]Apelin-13(65-77) | |
| {Hydrogen}[PE]RP[hArg][Cha][Atz(10K-mPEG)] | [PE65;hArg68;Cha69;Atz(10K-mPEG); | 1171 |
| HKG[Oic][Nle]P[4-Cl-F]{FreeAcid} | Oic74;Nle75;4-Cl-F77]Apelin-13(65-77) | |
| {Hydrogen}[PE]RP[hArg][Cha][Atz(20K-mPEG)] | [PE65;hArg68;Cha69;Atz(20K-mPEG)70; | 1178 |
| HKG[Oic][Nle]P[4-Cl-F]{FreeAcid} | Oic74;Nle75;4-Cl-F77]Apelin-13(65-77) | |
| {Hydrogen}[PE]RP[hArg][NMeLeu] | [PE65;hArg68;NMeLeu69;[Atz | 1179 |
| [Atz(20K-mPEG)]HKG[Oic][Nle][4-Cl-F] | (20K-mPEG)]70;Oic74;Nle75;4-Cl-F76] | |
| {FreeAcid} | Apelin-13(65-76) | |
| {Hydrogen}[PE]RP[hArg][Cha][Atz(20K-mPEG)] | [PE65;hArg68;Cha69;[Atz(20K-mPEG)]70; | 1180 |
| [HKG[Oic][Nle][4-Cl-F]{FreeAcid} | Oic74;Nle75;4-Cl-F76]Apelin-13(65-76) | |
| {Hydrogen}[PE]RP[hArg][NMeLeu][Atz(20K- | [PE65;hArg68;NMeLeu69;[Atz(20K-mPEG)] | 1181 |
| mPEG)]HKG[Oic][Nle]P[4-Cl-F]{FreeAcid} | 70;Oic74;Nle75;4-Cl-F77]Apelin-13(65-77) | |
| {Hydrogen}[PE]RP[hArg][Cha]S[Atz(1K-mPEG)] | [PE65;hArg68;Cha69;Atz(1K-mPEG)71; | 1182 |
| KG[Oic][Nle]P[4-Cl-F]{FreeAcid} | Oic74;Nle75;4-Cl-F77]Apelin-13(65-77) | |
| {Hydrogen}[PE]RP[hArg][Cha]S[Atz(2K-mPEG)] | [PE65;hArg68;Cha69;Atz(2K-mPEG)K71; | 1183 |
| KG[Oic][Nle]P[4-Cl-F]{FreeAcid} | Oic74;Nle75;4-Cl-F77]Apelin-13(65-77) | |
| {Hydrogen}[PE]RP[hArg][Cha]S[Atz(5K-mPEG)] | [PE65;hArg68;Cha69;Atz(5K-mPEG)71; | 1184 |
| KG[Oic][Nle]P[4-Cl-F]{FreeAcid} | Oic74;Nle75;4-Cl-F77]Apelin-13(65-77) | |
| {Hydrogen}[PE]RP[hArg][Cha]S[Atz | [PE65;hArg68;Cha69;Atz(10K-mPEG); | 1185 |
| (10K-mPEG)]KG[Oic][Nle]P[4-Cl-F]{FreeAcid} | Oic74;Nle75;4-Cl-F77]Apelin-13(65-77) | |
| {Hydrogen}[PE]RP[hArg][Cha]S[Atz | [PE65;hArg68;Cha69;Atz(20K-mPEG)71; | 1186 |
| (20K-mPEG)]KG[Oic][Nle]P[4-Cl-F]{FreeAcid} | Oic74;Nle75;4-Cl-F77]Apelin-13(65-77) | |
| {Hydrogen}[PE]RP[hArg][NMeLeu]F[Atz(20K- | [PE65;hArg68;NMeLeu69;Phe70;[Atz(20K- | 1187 |
| mPEG)]KG[Oic][Nle]f{FreeAcid} | mPEG)]71;Oic74;Nle75;D-Phe76]Apelin-13 | |
| | (65-76) | |
| {Acetyl}[Atz(20K-mPEG)]LRP[hArg][NMeLeu] | Ac-[Atz(20K-mPEG)]-[Leu65;hArg68; | 1188 |
| [Atz(20K-mPEG)HKGP[Nle]P[4-Cl-F]{FreeACid} | NMeLeu69;[Atz(20K-mPEG)]70;Nle75; | |
| | 4-Cl-F77]Apelin-13(65-77) | |
| {Hydrogen}[PE]RP[hArg][NMeLeu]SHKGP | PE65;hArg68;NMeLeu69;Nle75;D-Bip77; | 1189 |
| [Nle]P[D-Bip]K(Ac-Atz(20K-mPEG)) | K(Ac-Atz(20K-mPEG))78]Apelin-13(65-78)- | |
| | amide | |
| {Acetyl}[Atz(1K-mPEG)]LRP[hArg][Cha] | Ac-Atz(1K-mPEG)-[Leu65;hArg68;Cha69; | 1190 |
| SHKG[Oic][Nle]P[4-Cl-F]{FreeAcid} | Oic74;Nle75;4-Cl-F77]Apelin-13(65-77) | |
| {Acetyl}[Atz(2K-mPEG)]LRP[hArg][Cha]SHKG | Ac-Atz(2K-mPEG)-[Leu65;hArg68;Cha69; | 1191 |
| [Oic][Nle]P[4-Cl-F]{FreeAcid} | Oic74;Nle75;4-Cl-F77]Apelin-13(65-77) | |
| {Acetyl}[Atz(5K-mPEG)]LRP[hArg][Cha] | Ac-Atz(5K-mPEG)-[Leu65;hArg68;Cha69; | 1192 |
| SHKG[Oic][Nle]P[4-Cl-F]{FreeAcid} | Oic74;Nle75;4-Cl-F77]Apelin-13(65-77) | |
| {Acetyl}[Atz(10K-mPEG)]LRP[hArg] | Ac-Atz(10K-mPEG)-[Leu65;hArg68;Cha69; | 1193 |
| [Cha]SHKG[Oic][Nle]P[4-Cl-F]{FreeAcid} | Oic74;Nle75;4-Cl-F77]Apelin-13(65-77) | |
| {Acetyl}[Atz(20K-mPEG)]LRP[hArg][Cha] | Ac-Atz(20K-mPEG)-[Leu65;hArg68;Cha69; | 1194 |
| SHKG[Oic][Nle]P[4-Cl-F]{FreeAcid} | Oic74;Nle75;4-Cl-F77]Apelin-13(65-77) | |
| {Hydrogen][Atz(20K-mPEG)]KFRRQRP[hArg] | Atz(20K-mPEG)-[hArg68;Cha69;Oic74; | 1195 |
| [Cha]SHKG[Oic][Nle]P[4-Cl-F]{FreeAcid} | Nle75;4-Cl-F77]Apelin-17(61-77) | |
| {Acetyl}[Atz(20K-mPEG)]LRP[hArg] | [Ac-Atz(20K-mPEG)64;hArg68; | 1196 |
| [Cha]SHKGP[Nle]{FreeAcid} | Cha69;Nle75;D-1-Nal76]Apelin-13(64-76) | |
| {Acetyl}[Atz(20K-mPEG)][Ahx]LRP[hArg] | [Ac-Atz(20K-mPEG)63;Ahx64;hArg68; | 1197 |
| [Cha]SHKGP[Nle][D-1Nal]{FreeAcid} | Cha69;Nle75;D-1-Nal76]Apelin-13(63-76) | |
| {Hydrogen][Atz(20K-mPEG)]LRP[hArg][Cha] | Atz(20K-mPEG)-[Leu65;hArg68;Cha69; | 1198 |
| SHKG[Oic][Nle]P[4-Cl-F]{FreeAcid} | Oic74;Nle75;4-Cl-F77]Apelin-13(65-77) | |
| {Thiopropionyl(20K-mPEG)}LRP[hArg][Cha] | Thiopropionyl(20K-mPEG)-[Leu65;hArg68; | 1199 |
| SHKG[Oic][Nle]P[4-Cl-F]{FreeAcid} | Cha69;Oic74;Nle75;4-Cl-F77]Apelin-13(65-77) | |
| {Thiopropionyl(20K-mPEG}KFRRQRP[hArg] | Thiopropionyl(20K-mPEG)-[hArg68;Cha69; | 1200 |
| [Cha]SHKG[Oic][Nle]P[4-Cl-F]{FreeAcid} | Oic74;Nle75;4-Cl-F77]Apelin-17(61-77) | |
| {Thiopropionyl(40K-mPEG)}KFRRQRP[hArg] | Thiopropionyl(40K-mPEG)-[hArg68;Cha69; | 1201 |
| [Cha]SHKG[Oic][Nle]P[4-Cl-F]{FreeAcid} | Oic74;Nle75;4-Cl-F77]Apelin-17(61-77) | |
| {Thiopropionyl(20K-mPEG)}LLRP[hArg] | Thiopropionyl(20K-mPEG)-Leu-[Leu65;hArg68; | 1202 |
| [Cha]SHKG[Oic][Nle]P[4-Cl-F]{FreeAcid} | Cha69;Oic74;Nle75;4-Cl-F77]Apelin-13(65-77) | |
| {Thiopropionyl(20K-mPEG)}FRRQRP[hArg] | Thiopropionyl(20K-mPEG)-[hArg68;Cha69; | 1203 |
| [Cha]SHKG[Oic][Nle]P[4-Cl-F]{COOH} | Oic74:Nle75;5-Cl-F77]Apelin-17(62-77) | |
| {Thiopropionyl(20K-mPEG)}RRQRP[hArg] | Thiopropionyl(20K-mPEG)-[hArg68;Cha69; | 1204 |
| [Cha]SHKG[Oic][Nle]P[4-Cl-F]{COOH} | Oic74:Nle75;5-Cl-F77]Apelin-17(63-77) | |
| {Thiopropionyl(20K-mPEG)}RQRP[hArg] | Thiopropionyl(20K-mPEG)-[hArg68;Cha69; | 1205 |
| [Cha]SHKG[Oic][Nle]P[4-Cl-F]{COOH} | Oic74:Nle75;5-Cl-F77]Apelin-17(64-77) | |
| {Thiopropionyl(20K-mPEG)}QRP[hArg] | Thiopropionyl(20K-mPEG)-[hArg68;Cha69; | 1206 |
| [Cha]SHKG[Oic][Nle]P[4-Cl-F]{COOH} | Oic74:Nle75;5-Cl-F77]Apelin-17(65-77) | |
| {Thiopropionyl(1K-mPEG)}QRP[hArg][Cha] | Thiopropionyl(1K-mPEG)-[hArg68;Cha69; | 1207 |
| SHKG[Oic][Nle]P[4-Cl-F]{FreeAcid} | Oic74:Nle75;5-Cl-F77]Apelin-17(65-77) | |
| {Thiopropionyl(2K-mPEG)}QRP[hArg] | Thiopropionyl(2K-mPEG)-[hArg68;Cha69; | 1208 |
| [Cha]SHKG[Oic][Nle]P[4-Cl-F]{FreeAcid} | Oic74;Nle75;4-Cl-F77]Apelin-17(65-77) | |
| {Thiopropionyl(5K-mPEG)}QRP[hArg] | Thiopropionyl(5K-mPEG)-[hArg68;Cha69; | 1209 |
| [Cha]SHKG[Oic][Nle]P[4-Cl-F]{FreeAcid} | Oic74;Nle75;4-Cl-F77]Apelin-17(65-77) | |
| {Thiopropionyl(10K-mPEG)}QRP[hArg] | Thiopropionyl(10K-mPEG)-[hArg68;Cha69; | 1210 |
| [Cha]SHKG[Oic][Nle]P[4-Cl-F]{FreeAcid} | Oic74;Nle75;4-Cl-F77[Apelin-17(65-77) | |
| {Thiopropionyl(40K-mPEG)}QRP[hArg] | Thiopropionyl(40K-mPEG)-[hArg68;Cha69; | 1211 |
| [Cha]SHKG[Oic][Nle]P[4-Cl-F]{FreeAcid} | Oic74;Nle75;4-Cl-F77]Apelin-17(65-77) | |
| {Thiopropionyl(1K-mPEG}KFRRQRP[hArg] | Thiopropionyl(1K-mPEG)-[hArg68;Cha69; | 1212 |
| [Cha]SHKG[Oic][Nle]P[4-Cl-F]{FreeAcid} | Oic74;Nle75;4-Cl-F77]Apelin-17(61-77) | |
| {Thiopropionyl(2K-mPEG)}KFRRQRP[hArg] | Thiopropionyl(2K-mPEG)-[hArg68;Cha69; | 1213 |
| [Cha]SHKG[Oic][Nle]P[4-Cl-F]{FreeAcid} | Oic74;Nle75;4-Cl-F77]Apelin-17(61-77) | |
| {Thiopropionyl(5K-mPEG}KFRRQRP[hArg] | Thiopropionyl(5K-mPEG)-[hArg68;Cha69; | 1214 |
| [Cha]SHKG[Oic][Nle]P[4-Cl-F]{FreeAcid} | Oic74;Nle75;4-Cl-F77]Apelin-17(61-77) | |
| {Thiopropionyl(10K-mPEG)}KFRRQRP[hArg] | Thiopropionyl(10K-mPEG)-[hArg68;Cha69; | 1215 |
| [Cha]SHKG[Oic][Nle]P[4-Cl-F]{FreeAcid} | Oic74;Nle75;4-Cl-F77]Apelin-17(61-77) | |
| {Thiopropionyl(40K-mPEG)}KFRRQRP[hArg] | Thiopropionyl(40K-mPEG)-[hArg68;Cha69; | 1216 |
| [Cha]SHKG[Oic][Nle]P[4-Cl-F]{FreeAcid} | Oic74;Nle75;4-Cl-F77]Apelin-17(61-77) | |
| {Thiopropionyl(20K-mPEG)}F[hArg][hArg]Q | Thiopropionyl(20K-mPEG)-[hArg68;Cha69; | 1217 |
| [hArg]P[hArg][Cha]SHKG[Oic][Nle]P[4-Cl-F] | Oic74;Nle75;4-Cl-F77]Apelin-17(62-77) | |
| {Thiopropionyl(20K-mPEG)}OF[hArg][hArg]Q | Thiopropionyl(20K-mPEG)-[Orn61; | 1218 |
| [hArg]P[hArg][Cha]SHKG[Oic][Nle]P[4-Cl-F] | hArg63,64,66,68;Cha69;Oic74;Nle75;4-Cl-F77] | |
| | Apelin-17(61-77) | |
| {Thiopropionyl(20K-mPEG)}OF[hArg][hArg]Q | Thiopropionyl(20K-mPEG)-[Orn61; | 1219 |
| [Cit]P[hArg][Cha]SHKG[Oic][Nle]P[4-Cl-F] | hArg63,64,68;Cit66;Cha69;Oic74;Nle75; | |
| | 4-Cl-F77]Apelin-17(61-77) | |
| {Thipropionyl(20K-mPEG)}F[hArg][hArg]Q | Thiopropionyl(20K-mPEG)-[hArg63,64,68; | 1220 |
| [Cit]P[hArg][Cha]SHKG[Oic][Nle]P[4-Cl-F] | Cit66;Cha69;Oic74;Nle75;4-Cl-F77]Apelin-17 | |
| | (62-77) | |
| {Thipropionyl(20K-mPEG)}F[Cit][Cit]Q[hArg] | Thiopropionyl(20K-mPEG)-[Cit63,64; | 1221 |
| P[hArg][Cha]SHKG[Oic][Nle]P[4-Cl-F] | hArg66,68;Cha69;Oic74;Nle75;4-Cl-F77] | |
| | Apelin-17(62-77) | |
| [NPeg11]KFRRQRP[hArg][Cha]SHKG[Oic] | NPeg11-[hArg68;Cha69;Oic74;Nle75;4-Cl-F77] | 1222 |
| [Nle]P[4-Cl-F] | Apelin-17(61-77) | |
| [Atz(PEG10)]KFRRQRP[hArg][Cha]SHKG | Atz(Peg10)-[hArg68;Cha69;Oic74;Nle75;4-Cl- | 1223 |
| [Oic][Nle]P[4-Cl-F] | F77]Apelin-17(61-77) | |
| [Atz(PEG10)]KF[hArg][hArg]QRP[hArg][Cha] | Atz(Peg10)-[hArg63,64,68;Cha69;Oic74;Nle75; | 1224 |
| SHKG[Oic][Nle]P[4-Cl-F] | 4-Cl-F77]Apelin-17(61-77) | |
| [Atz(PEG10)]KF[hArg][hArg]Q[hArg]P[hArg] | Atz(Peg10)-[hArg63,64,68;Cha69;Oic74;Nle75; | 1225 |
| [Cha]SHKG[Oic][Nle]P[4-Cl-F] | 4-Cl-F77]Apelin-17(61-77) | |
| [Atz(PEG10)]KF[hArg][hArg]QQP[hArg] | Atz(Peg10)-[hArg63,64,68;Gln66;Cha69;Oic74; | 1226 |
| [Cha]SHKG[Oic][Nle]P[4-Cl-F] | Nle75;4-Cl-F77]Apelin-17(61-77) | |
| [Atz(PEG10)]KF[hArg][hArg][Cit]Q[Cit]P | Atz(Peg10)-[hArg63,64,68;Cit66;Cha69;Oic74; | 1227 |
| [hArg][Cha]SHKG[Oic][Nle]P[4-Cl-F] | Nle75;4-Cl-F77]Apelin-17(61-77) | |
| [Atz(PEG10)]KF[hArg][Cit]Q[Cit]P[hArg] | Atz(Peg10)-[hArg63,68;Cit64,66;Cha69;Oic74; | 1228 |
| [Cha]SHKG[Oic][Nle]P[4-Cl-F] | Nle75;4-Cl-F77]Apelin-17(61-77) | |
| [Atz(PEG10)]KF[Cit][Cit]Q[hArg]P[hArg] | Atz(Peg10)-[Cit63,64;hArg66,68;Cha69; | 1229 |
| [Cha]SHKG[Oic][Nle]P[4-Cl-F] | Oic74;Nle75;4-Cl-F77]Apelin-17(61-77) | |
| [Atz(PEG10)]KF[Cit][Cit]Q[Cit]P[hArg][Cha] | Atz(Peg10)-[Cit63,64,66;hArg68;Cha69; | 1230 |
| SHKG[Oic][Nle]P[4-Cl-F] | Oic74;Nle75;4-Cl-F77]Apelin-17(61-77) | |
| [Atz(PEG10)]OFRRQRP[hArg][Cha]SHKG | Atz(Peg10)-[Orn61;hArg68;Cha69;Oic74; | 1231 |
| [Oic][Nle]P[4-Cl-F] | Nle75;4-Cl-F77]Apelin-17(61-77) | |
| [Atz(PEG10)]OF[hArg][hArg]Q[hArg] | Atz(Peg10)-[Orn61;hArg63,64,66,68;Cha69; | 1232 |
| P[hArg][Cha]SHKG[Oic][Nle]P[4-Cl-F] | Oic74;Nle75;4-Cl-F77]Apelin-17(61-77) | |
| [Atz(PEG10)]FRRQRP[hArg][Cha]SHKG[Oic] | Atz(Peg10)-[hArg68;Cha69;Oic74;Nle75; | 1233 |
| [Nle]P[4-Cl-F] | 4-Cl-F77]Apelin-17(62-77) | |
| [Atz(PEG10)]LRP[hArg][Cha]SHKG[Oic] | Atz(Peg10)-[Leu65;hArg68;Cha69;Oic74; | 1234 |
| [Nle]P[4-Cl-F] | Nle75;4-Cl-F77]Apelin-17(65-77) | |
| {Palmitoyl}LRP[hArg][Cha]FHKGP[Nle] | Palmitoyl-[Leu65;hArg68;Cha69;Phe70; | 1235 |
| [4-Cl-F]{FreeAcid} | Nle75;4-Cl-F76]Apelin-13(65-76) | |
| {Palmitoyl}LRP[hArg][Cha]FHKPP[Nle] | Palmitoyl-[Leu65;hArg68;Cha69;Phe70; | 1236 |
| [D-1Nal]{FreeAcid} | Pro73;Nle75;D-1Nal76]Apelin-13(65-76) | |
| {Palmitoyl}LRP[hArg][Cha]SHKGP[Nle] | Palmitoyl-Leu65;hArg68;Cha69;Nle75; | 1237 |
| [4-Cl-F] | 4-Cl-F76]Apelin-13(65-76) | |
| {Palmitoyl}LRP[hArg][NMeLeu]FA[1-Nal]G | Palmitoyl-[Leu65;hArg68;NMeLeu69; | 1238 |
| [1-Nal][Nle][4-Cl-F]{Amide} | Phe70;Ala71;1-Nal72,74;Nle75;4-Cl-F76] | |
| | Apelin-13(65-76) | |
| {Palmitoyl}LRP[hArg][NMeLeu]FA[1-Nal]G | Palmitoyl-[Leu65;hArg68;NMeLeu69;Phe70; | 1239 |
| [Oic][Nle][4-Cl-F]{Amide} | Ala71;1-Nal72,Oic74;Nle75;4-Cl-F76]Apelin-13 | |
| | (65-76) | |
| {Palmitoyl}LRP[hArg][NMeLeu]FA[1-Nal]G | Palmitoyl-[Leu65;hArg68;NMeLeu69;Phe70; | 1240 |
| [1-Nal][Nle][4-Cl-F]{Amide} | Ala71;1-Nal72,74;Nle75;4-Cl-F76]Apelin-13 | |
| | (65-76) | |

[0407] Additional numbered embodiments are shown below.

[0408] 76. An isolated polypeptide comprising the amino acid sequence:

(SEQ ID NO: 1561)
[Z]X₁X₂X₃X₄X₅X₆X₇X₈X₉X₁₀X₁₁X₁₂

[0409] wherein:
[0410] a) Z is any amino acid, an acyl group, an aryl group, an alkyl group, [Atz(PEG10)], a PEG derivative or other serum half-life prolonging group or is absent.
[0411] b) X₁ is Q, N, E, D, L, V, I, P, H, W, F, Y, A, [1-Nal], [2-Nal], [Bip], [Cha], [Nle], [Pra], [MerPr], [PE] or [Atz(PEG10)],
[0412] c) X₂ is R, A, K, Q, [Pra], [MerPr], [2Pal], [3Pal], [4Pal], [Orn], [Dpr], [Dab], [hArg], [NMe-Arg], [Cit] or [Atz(PEG10)],
[0413] d) X₃ is P, [Oic], [Tic], A, R, [Aib], G, [Pra] or [Atz(PEG10)],
[0414] e) X₄ is R, K, Q, [2Pal], [3Pal], [4Pal], [Orn], [Dpr], [Dab], [hArg], [NMe-Arg], [Cit], [Pra], L or [Atz(PEG10)],
[0415] f) X₅ is L, A, F, Q, S, [2-Nal], [Bip], [Cha], [Chg], [pI-Phe], [Pra] or [NMeLeu], g) X₆ is S, [1-Nal], [2-Nal], [2Pal], [3Pal], [4-Cl—F], [4-F—F], [4-I—F], [4-Me-F], [Abu], [Bip], [Cha], [Chg], [Cit], [Cpg], [Dab], [Dap], [Dip], [Nle], [NMe-Phe], [Nva], [Orn], [Atz(PEG10)], [Pra], [Tic], A, F, G, H, I, L, R, T, V, W or Y,
[0416] h) X₇ is H, [1-Nal], [2-Nal], [2Pal], [3Pal], [4-Cl—F], [4-F—F], [4-I—F], [Abu], [Bip],

[0417] [Cha], [Chg], [Cpg], [Dab], [Dap], [Dip], [Nle], [NMe-Phe], [Nva], [Orn], [Atz(PEG10)], [Pra], [Tic], A, F, G, h, H, I, K, L, O, R, T, V, W or Y,
[0418] i) X₈ is K, [1-Nal], [2-Nal], [2Pal], [3Pal], [4AmP], [4-Cl—F], [4-F—F], [44-F], [Bip],

[0419] [Cha], [Chg], [Cpg], [Dab], [Dap], [Dip], [Dpr], [hArg], [K(Me2)], [LYSIPR], [Nle], [Nva], [Orn], [Pra], A, F, G, H, R, V, W or [Atz(PEG10)],
[0420] j) X₉ is G, [bAla], [Hyp], [Oic], [Pra], [Sar], [Thz], a, A, P, [Aib] or [Atz(PEG10)],
[0421] k) X₁₀ is P, [Oic], [hero], [Tic], [Tiq], [Thz], [1-Nal], [Pra] or [Atz(PEG10)],
[0422] l) X_{II} is M, [4-Cl—F], [4-F—F], [4-Me-F], [Bip], [Cha], [Nle], [NMeLeu], [pI-Phe], [Atz(PEG10)], [Pra], A, F, P or S, and
[0423] m) X₁₂ is P, [1-Nal], [4-Cl—F], [4-F—F], [4-Me-F], [D-1Nal], [D-Bip], [Nle], [NMePhe], [Oic], [Tic], f, F, w, y, G, [Pra] or [Atz(PEG10)], in either in the L- or D-optical configuration, or other aromatic amino acids in either in the L- or D-optical configuration.

[0424] 77. The isolated polypeptide of Embodiment 76, wherein at least four amino acid residues in the X₁-X₁₂ positions are amino acids not present at residues number 65-76 in the sequence of wild-type Apelin (SEQ ID NO: 138) and the polypeptide has increased proteolytic stability and/or an increased plasma/serum residence time relative to wild type Apelin-13 (SEQ ID NO:2).

[0425] 78. The polypeptide of Embodiment 77 comprising a PEG derivative or other moiety to extend circulating half-life, wherein said derivative or moiety is or is not attached via a linker.

[0426] 79. An APJ agonist having an amino acid sequence selected from the group of sequences consisting of SEQ ID NOs: 1241-1326. Table 10 shows examples of embodiments 76-79. The examples can include a free acid that can be a carboxylic acid and an amide that can be at the C-terminus

TABLE 10

| | | SEQ |
|---|---|---|
| AMINO ACID SEQUENCE | DESIGNATION | ID NO. |
| {Hydrogen}[PE]RP[hArg][Cha]SHKGP[Nle][4-F—F]{FreeAcid} | [PE65; hArg68; Cha69; Nle75; 4-F—F76]Apelin-13(65-76) | 1241 |
| {Hydrogen}[PE]RP[hArg][Cha]SHKGP[Nle][4-Me—F]{FreeAcid} | [PE65; hArg68; Cha69; Nle75; 4-Me—F76]Apelin-13(65-76) | 1242 |
| {Hydrogen}[PE]RP[hArg][Cha]SHKGP[Nle][D-Bip]{FreeAcid} | [PE65; hArg68; Cha69; Nle75; D-Bip76]Apelin-13(65-76) | 1243 |
| {Hydrogen}[PE]RP[hArg][Cha]SHKGP[Nle]y{FreeAcid} | [PE65; hArg68; Cha69; Nle75; D-Tyr76]Apelin-13(65-76) | 1244 |
| {Hydrogen}[PE]RPR[Cha]SHKGP[Nle]F{FreeAcid} | [PE65; Cha69; Nle75; Phe76]Apelin-13(65-76) | 1245 |
| {Hydrogen}[PE]RP[hArg][NMeLeu]SHKGP[Nle]F{FreeAcid} | [PE65; hArg68; NMeLeu69; Nle75; Phe76]Apelin-13(65-76) | 1246 |
| {Hydrogen}[PE]RP[hArg][Cha]SHKGP[pI—Phe]F{FreeAcid} | [PE65; hArg68; Cha69; pI—Phe75; Phe76]Apelin-13(65-76) | 1247 |
| {Hydrogen}[PE]RPR[Cha]SHKGP[pI—Phe]F{FreeAcid} | [PE65; Cha69; pI—Phe75; Phe76]Apelin-13(65-76) | 1248 |
| {Hydrogen}[PE]RP[hArg][NMeLeu]SHKGP[pI—Phe]F{FreeAcid} | [PE65; hArg68; NMeLeu69; pI—Phe75; Phe76]Apelin-13(65-76) | 1249 |
| {Hydrogen}[PE]RP[hArg][Cha]SHKGP[Nle][pI—Phe]{FreeAcid} | [PE65; hArg68; Cha69; Nle75; pI—Phe76]Apelin-13(65-76) | 1250 |
| {Hydrogen}[PE]RP[hArg][Cha]SHKPP[Nle][D-1Nal]{Amide} | [PE65; hArg68; Cha69; Pro73; Nle75; D-1Nal76]Apelin-13(65- | 1251 |
| | 76)-amide | |
| {Hydrogen}[PE]RP[hArg][Cha]FHKPP[Nle][4-Cl—F]{FreeAcid} | [PE65; hArg68; Cha69; Phe70; Pro73; Nle75; 4-Cl—F76]Apelin- | 1252 |
| | 13(65-76) | |
| {Hydrogen}[PE]RP[hArg][Cha]FHKGP[Nle][4-Cl—F]{FreeAcid} | [PE65; hArg68; Cha69; Phe70; Nle75; 4-Cl—F76]Apelin-13(65- | 1253 |
| | 76) | |
| {Hydrogen}[PE]RP[hArg][Cha]SHKPP[Nle][4-Cl—F]{FreeAcid} | [PE65; hArg68; Cha69; Pro73; Nle75; 4-Cl—F76]Apelin-13(65- | 1254 |
| | 76) | |
| {Hydrogen}[PE]RP[hArg][Cha]FHKPP[Nle][D-1Nal]{FreeAcid} | [PE65; hArg68; Cha69; Phe70; Pro73; Nle75; D-1Nal76]Apelin- | 1255 |
| | 13(65-76) | |
| {Hydrogen}[PE]RP[hArg][Cha]FHKGP[Nle][D-1Nal]{FreeAcid} | [PE65; hArg68; Cha69; Phe70; Nle75; D-1Nal76]Apelin-13(65- | 1256 |
| | 76) | |
| {Hydrogen}[PE]RP[hArg][Cha]FHKPP[Nle][D1Nal]{Amide} | [PE65; hArg68; Cha69; Phe70; Pro73; Nle75; D-1Nal76]Apelin- | 1257 |
| | 13(65-76)-amide | |
| {Hydrogen}[PE]RP[hArg][Cha]FHKGP[Nle][D-1Nal]{Amide} | [PE65; hArg68; Cha69; Phe70; Nle75; D-1Nal76]Apelin-13(65- | 1258 |
| | 76)-amide | |
| {Hydrogen}[PE]RP[hArg][Cha]FHKPP[Nle][4-Cl—F]{Amide} | [PE65; hArg68; Cha69; Phe70; Pro73; Nle75; 4-Cl—F76]Apelin- | 1259 |
| | 13(65-76)-amide | |
| {Hydrogen}[PE]RP[hArg][Cha]FHKGP[Nle][4-Cl—F]{Amide} | [PE65; hArg68; Cha69; Phe70; Nle75; 4-Cl—F76]Apelin-13(65- | 1260 |
| | 76)-amide | |
| {Hydrogen}[PE]RP[hArg][Cha]SHKGP[Nle]f {Amide} | [PE65; hArg68; Cha69; Nle75; D-Phe76]Apelin-13(65-76)-amide | 1261 |
| {Hydrogen}[PE]RP[hArg][Cha]SHKGP[Nle]w{Amide} | [PE65; hArg68; Cha69; Nle75; D-Trp76]Apelin-13(65-76)-amide | 1262 |
| {Hydrogen}[PE]RP[hArg][Cha]SHKGP[Nle][D-2Nal]{Amide} | [PE65; hArg68; Cha69; Nle75; D-2Nal76]Apelin-13(65-76)- | 1263 |
| | amide | |
| {Hydrogen}[PE]RP[hArg][NMeLeu][NMePhe]AKG[1-Nal][Nle]f | [PE65; hArg68; NMeLeu69; NMePhe70; Ala71; 1-Nal74; Nle75; | 1264 |
| {FreeAcid} | D-Phe76]Apelin-13(65-76) | |
| {Hydrogen}[PE]RP[hArg][NMeLeu]FHKG[1-Nal][Nle]f | [PE65; hArg68; NMeLeu69; Phe70; 1-Nal74; Nle75; D- | 1265 |
| {FreeAcid} | Phe76]Apelin-13(65-76) | |
| {Hydrogen}[PE]RP[hArg][Cha]SHKGP[Nle][4-Cl—F]{Amide} | [PE65; hArg68; Cha69; Nle75; 4-Cl—F76]Apelin-13(65-76)- | 1266 |
| | amide | |
| {Hydrogen}[PE]RP[hArg][Cha]SHKG[1-Nal][Nle][4-Cl—F] | [PE65; hArg68; Cha69; 1-Nal74; Nle75; 4-Cl—F76]Apelin- | 1267 |
| {Amide} | 13(65-76)-amide | |
| {Hydrogen}[PE]RP[hArg][Cha]FHKG[1-Nal][Nle][4-Cl—F] | [PE65; hArg68; Cha69; Phe70; 1-Nal74; Nle75; 4-Cl— | 1268 |
| {Amide} | F76]Apelin-13(65-76)-amide | |
| {Hydrogen}[PE]RP[hArg][Cha]FHKGP[Nle][4-Cl—F]{Amide} | [PE65; hArg68; Cha69; Phe70; Nle75; 4-Cl—F76]Apelin-13(65- | 1269 |
| | 76)-amide | |
| {Hydrogen}[PE]RP[hArg][Cha]SAKG[1-Nal][Nle][4-Cl—F] | [PE65; hArg68; Cha69; Ala71; 1-Nal74; Nle75; 4-Cl— | 1270 |
| {Amide} | F76]Apelin-13(65-76)-amide | |
| {Hydrogen}[PE]RP[hArg][Cha]FAKG[1-Nal][Nle][4-Cl—F] | [PE65; hArg68; Cha69; Phe70; Ala71; 1-Nal74; Nle75; 4-Cl— | 1271 |
| {Amide} | F76]Apelin-13(65-76)-amide | |
| {Hydrogen}[PE]RP[hArg][Cha][NMePhe][2-Nal]KG[1- | [PE65; hArg68; Cha69; NMePhe70; 2-Nal71; 1-Nal74; Nle75; 4- | 1272 |
| Nal][Nle][4-Cl—F]{FreeAcid} | Cl—F76]Apelin-13(65-76) | |
| {Hydrogen}[PE]RP[hArg][Cha]FAKGP[Nle][4-Cl—F]{Amide} | [PE65; hArg68; Cha69; Phe70; Ala71; Nle75; 4-Cl—F76]Apelin- | 1273 |
| | 13(65-76)-amide | |
| {Hydrogen}[PE]RP[hArg][Cha]S [1-Nal]KG[1-Nal][Nle][4-Cl—F] | [PE65; hArg68; Cha69; 1-Nal71, 74; Nle75; 4-Cl—F76]Apelin- | 1274 |
| {Amide} | 13(65-76)-amide | |
| {Hydrogen}[PE]RP[hArg][Cha]F[1-Nal]KG[1-Nal][Nle][4-Cl—F] | [PE65; hArg68; Cha69; Phe70; 1-Nal71, 74; Nle75; 4-Cl— | 1275 |
| {Amide} | F76]Apelin-13(65-76)-amide | |
| {Hydrogen}[PE]RP[hArg][Cha]F[1-Nal]KGP[Nle][4-Cl—F] | [PE65; hArg68; Cha69; Phe70; 1-Nal71; Nle75; 4-Cl— | 1276 |
| {Amide} | F76]Apelin-13(65-76)-amide | |
| {Hydrogen}[PE]RP[hArg][Cha][NMePhe][1-Nal]KG[1- | [PE65; hArg68; Cha69; NMePhe70; 1-Nal71, 74; Nle75; 4-Cl— | 1277 |
| Nal][Nle][4-Cl—F]{Amide} | F76]Apelin-13(65-76)-amide | |
| {Hydrogen}[PE]RP[hArg][Cha][NMePhe][1-Nal]KG[1- | [PE65; hArg68; Cha69; NMePhe70; 1-Nal71, 74; Nle75; 4-Cl— | 1278 |
| Nal][Nle][4-Cl—F]{Amide} | F76]Apelin-13(65-76)-amide | |
| {Hydrogen}[PE]RP[hArg][Cha][NMePhe][1-Nal]KGP[Nle][4-Cl— | [PE65; hArg68; Cha69; NMePhe70; 1-Nal71; Nle75; 4-Cl | 1279 |
| F]{Amide} | F76]Apelin-13(65-76)-amide | |
| {Hydrogen}[PE]RP[hArg][Cha][NMePhe]AKG[1-Nal][Nle][4- | [PE65; hArg68; Cha69; NMePhe70; Ala71; 1-Nal74; Nle75; 4- | 1280 |
| Cl—F]{Amide} | Cl—F76]Apelin-13(65-76)-amide | |
| {Hydrogen}[PE]RP[hArg][Cha][NMePhe]AKG[1-Nal][Nle][4- | [PE65; hArg68; Cha69; NMePhe70; Ala71; 1-Nal74; Nle75; 4- | 1281 |
| Cl—F]{Amide} | Cl—F76]Apelin-13(65-76)-amide | |
| {Hydrogen}[PE]RP[hArg][Cha][NMePhe]AKGP[Nle][4-Cl—F] | [PE65; hArg68; Cha69; NMePhe70; Ala71; Nle75; 4-Cl— | 1282 |
| {Amide} | F76]Apelin-13(65-76)-amide | |
| {Hydrogen}[PE]RP[hArg][Cha]S[2-Nal]KG[1-Nal][Nle][4-Cl—F] | [PE65; hArg68; Cha69; 2-Nal71; 1-Nal74; Nle75; 4-Cl— | 1283 |
| {Amide} | F76]Apelin-13(65-76)-amide | |
| {Hydrogen}[PE]RP[hArg][Cha]F[2-Nal]KG[1-Nal][Nle][4-Cl—F] | [PE65; hArg68; Cha69; Phe70; 2-Nal71; 1-Nal74; Nle75; 4-Cl— | 1284 |
| {Amide} | F76]Apelin-13(65-76)-amide | |
| {Hydrogen}[PE]RP[hArg][Cha]F[2-Nal]KGP[Nle][4-Cl—F] | [PE65; hArg68; Cha69; Phe70; 2-Nal71; Nle75; 4-Cl— | 1285 |
| {Amide} | F76]Apelin-13(65-76)-amide | |
| {Hydrogen}[PE]RP[hArg][Cha][NMePhe][2-Nal]KG[1- | [PE65; hArg68; Cha69; NMePhe70; 2-Nal71; 1-Nal74; Nle75; 4- | 1286 |
| Nal][Nle][4-Cl—F]{Amide} | Cl—F76]Apelin-13(65-76)-amide | |
| {Hydrogen}[PE]RP[hArg][Cha][NMePhe][2-Nal]KG[1- | [PE65; hArg68; Cha69; NMePhe70; 2-Nal71; 1-Nal74; Nle75; 4- | 1287 |
| Nal][Nle][4-Cl—F]{Amide} | Cl—F76]Apelin-13(65-76)-amide | |
| {Hydrogen}[PE]RP[hArg][Cha][NMePhe][2-Nal]KGP[Nle][4-Cl— | [PE65; hArg68; Cha69; NMePhe70; 2-Nal71; Nle75; 4-Cl— | 1288 |
| F]{Amide} | F76]Apelin-13(65-76)-amide | |
| {Hydrogen}[PE]RP[hArg][NMeLeu]F[1-Nal]KG[1-Nal][Nle]f | [PE65; hArg68; NMeLeu69; Phe70; 1-Nal71, 74; Nle75; D- | 1289 |
| {Amide} | Phe76]Apelin-13(65-76)-amide | |
| {Hydrogen}[PE]RP[hArg][NMeLeu]F[2-Nal]KG[1-Nal][Nle]f | [PE65; hArg68; NMeLeu69; Phe70; 2-Nal71; 1-Nal74; Nle75; D- | 1290 |
| {Amide} | Phe76]Apelin-13(65-76)-amide | |
| {Hydrogen}[PE]RP[hArg][Cha][NMePhe][1-Nal]KG[1- | [PE65; hArg68; Cha69; NMePhe70; 1-Nal71 74; Nle75; 4-Cl— | 1291 |
| Nal][Nle][4-Cl—F]{FreeAcid} | F76]Apelin-13(65-76) | |
| {Hydrogen}[PE]RP[hArg][NMeLeu]SHKGP[Nle]f{Amide} | [PE65; hArg68; NMeLeu69; Nle75; D-Phe76]Apelin-13(65-76)- | 1292 |
| | amide | |
| {Hydrogen}[PE]RP[hArg][NMeLeu]SHKG[1-Nal][Nle]f{Amide} | [PE65; hArg68; NMeLeu69; 1-Nal74; Nle75; D-Phe76]Apelin- | 1293 |
| | 13(65-76)-amide | |
| {Hydrogen}[PE]RP[hArg][NMeLeu]FHKG[1-Nal][Nle]f{Amide} | [PE65; hArg68; NMeLeu69; Phe70; 1-Nal74; Nle75; D- | 1294 |
| | Phe76]Apelin-13(65-76)-amide | |
| {Hydrogen}[PE]RP[hArg][NMeLeu]FHKGP[Nle]f {Amide} | [PE65; hArg68; NMeLeu69; Phe70; Nle75; D-Phe76]Apelin- | 1295 |
| | 13(65-76)-amide | |
| {Hydrogen}[PE]RP[hArg][NMeLeu]SAKG[1-Nal][Nle]f{Amide} | [PE65; hArg68; NMeLeu69; Ala71; 1-Nal74; Nle75; D- | 1296 |
| | Phe76]Apelin-13(65-76)-amide | |
| {Hydrogen}[PE]RP[hArg][NMeLeu]FAKG[1-Nal][Nle]f{Amide} | [PE65; hArg68; NMeLeu69; Phe70; Ala71; 1-Nal74; Nle75; D- | 1297 |
| | Phe76]Apelin-13(65-76)-amide | |
| {Hydrogen}[PE]RP[hArg][NMeLeu]FA[1-Nal]G[1-Nal][Nle]f | [PE65; hArg68; NMeLeu69; Phe70; Ala71; 1-Nal72, 74; Nle75; | 1298 |
| {Amide} | D-Phe76]Apelin-13(65-76)-amide | |
| {Hydrogen}[PE]RP[hArg][NMeLeu]FAKGP[Nle]f {Amide} | [PE65; hArg68; NMeLeu69; Phe70; Ala71; Nle75; D- | 1299 |
| | Phe76]Apelin-13(65-76)-amide | |
| {Hydrogen}[PE]RP[hArg][NMeLeu]S [1-Nal]KG[1-Nal][Nle]f | [PE65; hArg68; NMeLeu69; 1-Nal71, 74; Nle75; D- | 1300 |
| {Amide} | Phe76]Apelin-13(65 -76)-amide | |
| {Hydrogen}[PE]RP[hArg][NMeLeu]F[1-Nal]KG[1-Nal][Nle]f | [PE65; hArg68; NMeLeu69; Phe70; 1-Nal71 74; Nle75; D- | 1301 |
| {Amide} | Phe76]Apelin-13(65-76)-amide | |
| {Hydrogen}[PE]RP[hArg][NMeLeu]F[1-Nal]KGP[Nle]f {Amide} | [PE65; hArg68; NMeLeu69; Phe70; 1-Nal71; Nle75; D- | 1302 |
| | Phe76]Apelin-13(65 -76)-amide | |
| {Hydrogen}[PE]RP[hArg][NMeLeu][NMePhe][1-Nal]KGP[Nle]f | [PE65; hArg68; NMeLeu69; NMePhe70; 1-Nal71; Nle75; D- | 1303 |
| {Amide} | Phe76]Apelin-13(65-76)-amide | |
| {Hydrogen}[PE]RP[hArg][NMeLeu][NMePhe]AKG[1-Nal][Nle]f | [PE65; hArg68; NMeLeu69; NMePhe70; Ala71; 1-Nal74; Nle75; | 1304 |
| {Amide} | D-Phe76]Apelin-13(65-76)-amide | |
| {Hydrogen}[PE]RP[hArg][NMeLeu][NMePhe]AKG[1-Nal][Nle]f | [PE65; hArg68; NMeLeu69; NMePhe70; Ala71; 1-Nal74; Nle75; | 1305 |
| {Amide} | D-Phe76]Apelin-13(65-76)-amide | |
| {Hydrogen}[PE]RP[hArg][NMeLeu][NMePhe]A[1-Nal]G[1-Nal] | [PE65; hArg68; NMeLeu69; NMePhe70; Ala71; 1-Nal72, 74; | 1306 |
| [Nle]f{Amide} | Nle75; D-Phe76]Apelin-13(65-76)-amide | |
| {Hydrogen}[PE]RP[hArg][NMeLeu][NMePhe]AKGP[Nle]f | [PE65; hArg68; NMeLeu69; NMePhe70; Ala71; Nle75; D- | 1307 |
| {Amide} | Phe76]Apelin-13(65-76)-amide | |
| {Hydrogen}[PE]RP[hArg][NMeLeu]5 [2-Nal]KG[1-Nal][Nle]f | [PE65; hArg68; NMeLeu69; 2-Nal71; 1-Nal74; Nle75; D- | 1308 |
| {Amide} | Phe76]Apelin-13(65-76)-amide | |
| {Hydrogen}[PE]RP[hArg][NMeLeu]F[2-Nal]KG[1-Nal][Nle]f | [PE65; hArg68; NMeLeu69; Phe70; 2-Nal71; 1-Nal74; Nle75; D- | 1309 |
| {Amide} | Phe76]Apelin-13(65-76)-amide | |
| {Hydrogen}[PE]RP[hArg][NMeLeu]F[2-Nal]KGP[Nle]f{Amide} | [PE65; hArg68; NMeLeu69; Phe70; 2-Nal71; Nle75; D- | 1310 |
| | Phe76]Apelin-13(65 -76)-amide | |
| {Hydrogen}[PE]RP[hArg][NMeLeu][NMePhe][2-Nal]KGP[Nle]f | [PE65; hArg68; NMeLeu69; NMePhe70; 2-Nal71; Nle75; D- | 1311 |
| {Amide} | Phe76]Apelin-13(65-76)-amide | |
| [PE]RP[hArg][Cha]SHKGP[Nle][D-1Nal] | [PE65; hArg68; Cha69; Nle75; D-1Nal76]Apelin-13(65-76) | 1312 |
| [PE]RP[hArg][Cha]SHKGP[Nle][4-Cl—F] | [PE65; hArg68; Cha69; Nle75; 4-Cl—F76]Apelin-13(65-76) | 1313 |
| [PE]RP[hArg][Cha]SHKGP[Nle][2-Nal] | [PE65; hArg68; Cha69; Nle75; 2-Nal76]Apelin-13(65-76) | 1314 |
| [PE]RP[hArg][Cha]SHKGP[Nle][NMePhe]{Amide} | [PE65; hArg68; Cha69; Nle75; NMePhe76]Apelin-13(65-76)- | 1315 |
| | amide | |
| [PE]RP[hArg][Cha]SHKGP[Nle]f | [PE65; hArg68; Cha69; Nle75; D-Phe76]Apelin-13(65-76) | 1316 |
| [PE]RP[hArg][Cha]SHKGP[Nle]w | [PE65; hArg68; Cha69; Nle75; D-Trp76]Apelin-13(65-76) | 1317 |
| [PE]RP[hArg][Cha]SHKGP[Nle][1-Nal] | [PE65; hArg68; Cha69; Nle75; 1-Nal76]Apelin-13(65-76) | 1318 |
| [PE]RP[hArg][Cha]F[1-Nal]KG [1-Nal][Nle][4-Cl—F]{Amide} | [PE65; hArg68; Cha69; Phe70; 1-Nal71, 74; Nle75; 4-Cl— | 1319 |
| | F76]Apelin-13(65-76)-amide | |
| [PE]RP[hArg][NMeLeu]FA[1-Nal]G [1-Nal][Nle]f{Amide} | [PE65; hArg68; NMeLeu69; Phe70; Ala71; 1-Nal72, 74; Nle75; | 1320 |
| | D-Phe76]Apelin-13(65-76)-amid | |
| [PE]RP[hArg][Cha]F[1-Nal]KG[Oic][Nle][4-Cl—F]{Amide} | [PE65; hArg68; Cha69; Phe70; 1-Nal71, Oic74;Nle75; 4-Cl— | 1321 |
| | F76]Apelin-13(65-76)-amide | |
| [PE]RP[hArg][NMeLeu]FA[1-Nal]G[Oic][Nle]f {Amide} | [PE65; hArg68; NMeLeu69; Phe70; Ala71; 1-Nal72, Oic74; | 1322 |
| | Nle75; D-Phe76]Apelin-13(65-76)-a | |
| [PE]RP[hArg][Cha]F[1-Nal]KG [1-Nal][Nle][4-Cl—F]{Amide} | [PE65; hArg68; Cha69; Phe70; 1-Nal71, 74; Nle75; 4-Cl— | 1323 |
| | F76]Apelin-13(65-76)-amide | |
| [PE]RP[hArg][NMeLeu]FA[1-Nal]G [1-Nal][Nle]f{Amide} | [PE65; hArg68; NMeLeu69; Phe70; Ala71; 1-Nal72, 74; Nle75; | 1324 |
| | D-Phe76]Apelin-13(65-76)-amid | |
| {Hydrogen}[PE]RP[hArg][NMeLeu][NMePhe]A[1-Nal]G[1- | [PE65; hArg68; NMeLeu69; NMePhe70; Ala71; 1-Nal72, 74; | 1325 |
| Nal][Nle]f{Amide} | Nle75; D-Phe76]Apelin-13(65-76)-amide | |
| {Hydrogen}[PE]RP[hArg][NMeLeu]FA[1-Nal]G[1-Nal][Nle]f | [PE65; hArg68; NMeLeu69; Phe70; Ala71; 1-Nal72, 74; Nle75; | 1326 |
| {Amide} | D-Phe76]Apelin-13(65-76)-amide | |

[0427] Additional numbered embodiments are shown below.

[0428] 80. The isolated polypeptide of Embodiment 76, wherein X₁ or X₂ or X₁₂ are replaced with Z.

[0429] 81. The isolated polypeptide of Embodiment 76, wherein Z, or any of X₁-X₁₂ includes a PEG derivative or serum half-life prolonging group covalently attached via a linker or the derivative may be attached with no linker.

[0430] 82. An APJ agonist having an amino acid sequence selected from the group of sequences consisting of SEQ ID NOs: 1327-1379. Table 11 shows examples of embodiments 80-82. The examples can include a free acid that can be a carboxylic acid and an amide that can be at the C-terminus and can also include a PEG derivative or serum half-life prolonging group.

TABLE 11

| | | SEQ |
|---|---|---|
| AMINO ACID SEQUENCE | DESIGNATION | ID NO. |
| {Acetyl}[Atz(PEG10)]GGLRP[hArg][Cha]SHKGP[Nle]f{FreeAcid} | Ac-Atz(PEG10)-GG-[Leu65; hArg68; Cha69; Nle75; D- | 1327 |
| | Phe76]Apelin-13(65-76) | |
| {Acetyl}[Atz(PEG10)]GLRP[hArg][Cha]SHKGP[Nle]f{FreeAcid} | Ac-[Atz(PEG10)-G-[Leu65; hArg68; Cha69; Nle75; D- | 1328 |
| | Phe76]Apelin-13(65-76) | |
| {Acetyl}[Atz(PEG10)]LRP[hArg][Cha]SHKGP [Nle]f{FreeAcid} | Ac-Atz(PEG10)-[Leu65; hArg68; Cha69; Nle75; D- | 1329 |
| | Phe76]Apelin-13(65-76) | |
| {Acetyl}[Atz(PEG10)]RP[hArg][Cha]SHKGP[Nle]f{FreeAcid} | Ac-[Atz(PEG10)65; hArg68; Cha69; Nle75; D-Phe76]Apelin- | 1330 |
| | 13(65-76) | |
| {Hydrogen}[PE][Atz(PEG10)]P[hArg][Cha]SHKGP[Nle]f{FreeAcid} | [PE65; Atz(PEG10)66; hArg68; Cha69; Nle75; D- | 1331 |
| | Phe76]Apelin-13(65-76) | |
| {Hydrogen}[PE]R[Atz(PEG10)][hArg][Cha]SHKGP[Nle]f{FreeAcid} | [PE65; Atz(PEG10)67; hArg68; Cha69; Nle75; D- | 1332 |
| | Phe76]Apelin-13(65-76) | |
| {Hydrogen}[PE]RP[Atz(PEG10)][Cha]SHKGP[Nle]f{FreeAcid} | [PE65; Atz(PEG10)68; Cha69; Nle75; D-Phe76]Apelin- | 1333 |
| | 13(65-76) | |
| {Hydrogen}[PE]RP[hArg][Atz(PEG10)]SHKGP[Nle]f{FreeAcid} | [PE65; hArg68; Atz(PEG10)69; Nle75; D-Phe76]Apelin- | 1334 |
| | 13(65-76) | |
| {Hydrogen}[PE]RP[hArg][Cha][Atz(PEG10)]HKGP[Nle]f{FreeAcid} | [PE65; hArg68; Cha69; Atz(PEG10)70; Nle75; D- | 1335 |
| | Phe76]Apelin-13(65-76) | |
| {Hydrogen}[PE]RP[hArg][Cha]S[Atz(PEG10)]KGP[Nle]f{FreeAcid} | [PE65; hArg68; Cha69; Atz(PEG10)71; Nle75; D- | 1336 |
| | Phe76]Apelin-13(65-76) | |
| {Hydrogen}[PE]RP[hArg][Cha]SH[Atz(PEG10)]GP[Nle]f{FreeAcid} | [PE65; hArg68; Cha69; Atz(PEG10)72; Nle75; D- | 1337 |
| | Phe76]Apelin-13(65-76) | |
| {Hydrogen}[PE]RP[hArg][Cha]SHK[Atz(PEG10)]P[Nle]f{FreeAcid} | [PE65; hArg68; Cha69; Atz(PEG10)73; Nle75; D- | 1338 |
| | Phe76]Apelin-13(65-76) | |
| {Hydrogen}[PE]RP[hArg][Cha]SHKG[Atz(PEG10)][Nle]f{FreeAcid} | [PE65; hrg68; Cha69; Atz(PEG10)74; NleA7 5; D- | 1339 |
| | Phe76]Apelin-13(65-76) | |
| {Hydrogen}[PE]RP[hArg][Cha]SHKGP[Atz(PEG10)]f{FreeAcid} | [PE65; hArg68; Cha69; Atz(PEG10)75; D-Phe76]Apelin- | 1340 |
| | 13(65-76) | |
| {Hydrogen}[PE]RP[hArg][Cha]SHKGP[Nle][Atz(PEG10)]{Amide} | [PE65; hArg68; Cha69; Nle75; Atz(PEG10)76]Apelin-13(65- | 1341 |
| | 76)-amide | |
| {Hydrogen}[PE]RP[hArg][Cha]SHKGP[Nle]f[Atz(PEG10)]{Amide} | [PE65; hArg68; Cha69; Nle75; D-Phe76; | 1342 |
| | Atz(PEG10)77]Apelin-13(65-77)-amide | |
| {Hydrogen}[PE]RP[hArg][Cha]SHKGP[Nle]fG[Atz(PEG10)]{Amide} | [PE65; hArg68; Cha69; Nle75; D-Phe76; Gly77]Apelin- | 1343 |
| | 13(65-77)-Atz(PEG10)-amide | |
| {Hydrogen}[PE]RP[hArg][Cha]SHKGP [Nle]fGG[Atz(PEG10)] | [PE65; hArg68; Cha69; Nle75; D-Phe76; Gly77]Apelin- | 1344 |
| {Amide} | 13(65-77)-Gly-Atz(PEG10)-amide | |
| {Acetyl}[Atz(PEG10)]LRP[hArg][NMeLeu][Atz(PEG10)]HKGP[Nle] | Ac-Atz(PEG10)-[Leu65; hArg68; NMeLeu69; Atz(PEG10) | 1345 |
| [4-Cl—F]{FreeAcid} | 70; Nle75; 4-Cl—F76]Apelin-13(65-76) | |
| {Hydrogen}[PE]RP[hArg][Cha][Atz(PEG10)]HKGP[Nle][4-Cl—F] | [PE65; hArg68; Cha69; Atz(PEG10)70; Nle75; 4-Cl— | 1346 |
| {FreeAcid} | F76]Apelin-13(65-76) | |
| {Hydrogen}[PE]RP[hArg][Cha][Atz(PEG10)]HKG[Oic][Nle][4-Cl— | [PE65; hArg68; Cha69; Atz(PEG10)70; Oic74; Nle75; 4-C1— | 1347 |
| F]{FreeAcid} | F76]Apelin-13(65-76) | |
| {Hydrogen}[PE]RP[hArg][Cha][Atz(PEG10)]HKG[Oic][Nle][4-Cl— | [PE65; hArg68; Cha69; Atz(PEG10)70; Oic74; Nle75; 4-C1— | 1348 |
| F]{Amide} | F76]Apelin-13(65-76)-amide | |
| {Hydrogen}[PE]RP[hArg][Cha]F[Atz(PEG10)]KG[Oic][Nle][4-Cl— | [PE65; hArg68; Cha69; Phe70; Atz(PEG10)71; Oic74; Nle75; | 1349 |
| F]{FreeAcid} | 4-Cl—F76]Apelin-13(65-76) | |
| {Hydrogen}[PE]RP[hArg][Cha]F[Atz(PEG10)]KG[Oic][Nle][4-Cl— | [PE65; hArg68; Cha69; Phe70; Atz(PEG10)71; Oic74; Nle75; | 1350 |
| F]{Amide} | 4-Cl—F76]Apelin-13(65-76)-amide | |
| {Hydrogen}[PE]RP[hArg][NMeLeu]F[Atz(PEG10)]KG[Oic][Nle][4- | [PE65; hArg68; NMeLeu69; Phe70; Atz(PEG10)71; Oic74; | 1351 |
| Cl—F]{FreeAcid} | Nle75; 4-Cl—F76]Apelin-13(65-76) | |
| {Hydrogen}[PE]RP[hArg][NMeLeu]F[Atz(PEG10)]KG[Oic][Nle][4- | [PE65; hArg68; NMeLeu69; Phe70; Atz(PEG10)71; Oic74; | 1352 |
| Cl—F]{Amide} | Nle75; 4-Cl—F76]Apelin-13(65-76)-amide | |
| {Hydrogen}[PE]RP[hArg][NMeLeu][Atz(PEG10)]HKGP [Nle][4- | [PE65; hArg68; NMeLeu69; Atz(PEG10)70; Nle75; 4-Cl— | 1353 |
| Cl—F]{FreeAcid} | F76]Apelin-13(65-76) | |
| {Hydrogen}[PE]RP[hArg][NMeLeu][Atz(PEG10)]HKG[Oic][Nle][4- | [PE65; hArg68; NMeLeu69; Atz(PEG10)70; Oic74; Nle75; 4- | 1354 |
| Cl—F]{FreeAcid} | Cl—F76]Apelin-13(65-76) | |
| {Hydrogen}[PE]RP[hArg][NMeLeu][Atz(PEG10)]HKG[Oic][Nle][4- | [PE65; hArg68; NMeLeu69; Atz(PEG10)70; Oic74; Nle75; 4- | 1355 |
| Cl—F]{Amide} | Cl—F76]Apelin-13(65-76)-amide | |
| {Acetyl}[Atz(PEG10)]LRP[hArg][NMeLeu][Atz(PEG10)]HKGP[Nle] | Ac-Atz(PEG10)-[Leu65; hArg68; NMeLeu69;Atz(PEG10)70; | 1356 |
| f{FreeAcid} | Nle75; D-Phe76]Apelin-13(65-76) | |
| {Hydrogen}[PE]RP[hArg][Cha][Atz(PEG10)]HKGP[Nle]f{FreeAcid} | [PE65; hArg68; Cha69; Atz(PEG10)70; Nle75; D-Phe76] | 1357 |
| | Apelin-13(65-76) | |
| {Hydrogen}[PE]RP[hArg][Cha][Atz(PEG10)]HKG[Oic][Nle]f | [PE65; hArg68; Cha69; Atz(PEG10)70; Oic74; Nle75; D- | 1358 |
| {FreeAcid} | Phe76]Apelin-13(65-76) | |
| {Hydrogen}[PE]RP[hArg][Cha]F[Atz(PEG10)]KGP[Nle]f{FreeAcid} | [PE65; hArg68; Cha69; Phe70; Atz(PEG10)71; Nle75; D- | 1359 |
| | Phe76]Apelin-13(65-76) | |
| {Hydrogen}[PE]RP[hArg][Cha]F[Atz(PEG10)]KG[Oic][Nle]f | [PE65; hArg68; Cha69; Phe70; Atz(PEG10)71; Oic74; Nle75; | 1360 |
| {FreeAcid} | D-Phe76]Apelin-13(65-76) | |
| {Hydrogen}[PE]RP[hArg][Cha]F[Atz(PEG10)]KGP[Nle]f{Amide} | [PE65; hArg68; Cha69; Phe70; Atz(PEG10)71; Nle75; D- | 1361 |
| | Phe76]Apelin-13(65-76)-amide | |
| {Hydrogen}[PE]RP[hArg][Cha]F[Atz(PEG10)]KG[Oic][Nle]f{Amide} | [PE65; hArg68; Cha69; Phe70; Atz(PEG10)71; Oic74; Nle75; | 1362 |
| | D-Phe76]Apelin-13(65-76)-amide | |
| {Hydrogen}[PE]RP [hArg][NMeLeu]F[Atz(PEG10)]KGP [Nle]f | [PE65; hArg68; NMeLeu69; Phe70; Atz(PEG10)71; Nle75; | 1363 |
| {FreeAcid} | D-Phe76]Apelin-13(65-76) | |
| {Hydrogen}[PE]RP [hArg][NMeLeu]F[Atz(PEG10)]KG[Oic][Nle]f | [PE65; hArg68; NMeLeu69; Phe70; Atz(PEG10)71; Oic74; | 1364 |
| {FreeAcid} | Nle75; D-Phe76]Apelin-13(65-76) | |
| {Hydrogen}[PE]RP [hArg][NMeLeu]F[Atz(PEG10)]KGP[Nle]f | [PE65; hArg68; NMeLeu69; Phe70; Atz(PEG10)71; Nle75; | 1365 |
| {Amide} | D-Phe76]Apelin-13(65-76)-amide | |
| {Hydrogen}[PE]RP [hArg][NMeLeu]F[Atz(PEG10)]KG[Oic][Nle]f | [PE65; hArg68; NMeLeu69; Phe70; Atz(PEG10)71; Oic74; | 1366 |
| {Amide} | Nle75; D-Phe76]Apelin-13(65-76)-amide | |
| {Hydrogen}[PE]RP [hArg][NMeLeu][Atz(PEG10)]HKGP [Nle]f | [PE65; hArg68; NMeLeu69; Atz(PEG10)70; Nle75; D-Phe76] | 1367 |
| {FreeAcid} | Apelin-13(65-76) | |
| {Hydrogen}[PE]RP [hArg][NMeLeu][Atz(PEG10)]HKG[Oic][Nle]f | [PE65; hArg68; NMeLeu69; Atz(PEG10)70; Oic74; Nle75; D- | 1368 |
| {FreeAcid} | Phe76]Apelin-13(65-76) | |
| {Hydrogen}[PE]RP [hArg][NMeLeu][Atz(20K-mPEG)]HKG[Oic] | [PE65; hArg68; NMeLeu69; [Atz(20K-mPEGA70; Oic74; | 1369 |
| [Nle][4-Cl—F]{FreeAcid} | Nle75; 4-Cl—F76]Apelin-13(65-76) | |
| {Hydrogen}[PE]RP [hArg][Cha][Atz(20K-mPEG)]HKG[Oic][Nle][4- | [PE65; hArg68; Cha69; [Atz(20K-mPEGA70; Oic74; Nle75; | 1370 |
| Cl—F]{FreeAcid} | 4-Cl—F76]Apelin-13(65-76) | |
| {Hydrogen}[PE]RP [hArg][NMeLeu]F[Atz(20K-mPEG)]KG[Oic][Nle] | [PE65; hArg68; NMeLeu69; Phe70; [Atz(20K-mPEG)]71; | 1371 |
| f{FreeAcid} | Oic74; Nle75; D-Phe76]Apelin-13(65-76) | |
| {Acetyl}[Atz(20K-mPEG)]LRP [hArg][Cha]SHKGP[Nle][D-1Nal] | [Ac-Atz(20K-mPEG)64; hArg68; Cha69; Nle75; D-1-Nal76] | 1372 |
| {FreeAcid} | Apelin-13(64-76) | |
| {Acetyl}[Atz(20K-mPEG)][Ahx]LRP[hArg][Cha]SHKGP[Nle][D- | [Ac-Atz(20K-mPEG)63; Ahx64; hArg68; Cha69; Nle75; D-1- | 1373 |
| 1Nal]{FreeAcid} | Nal76]Apelin-13(63-76) | |
| {Palmitoyl}LRP[hArg][Cha]FHKGP [Nle][4-Cl—F]{FreeAcid} | Palmitoyl-[Leu65; hArg68; Cha69; Phe70; Nle75; 4-Cl—F76] | 1374 |
| | Apelin-13(65-76) | |
| {Palmitoyl}LRP[hArg][Cha]FHKPP [Nle][D-1Nal]{FreeAcid} | Palmitoyl-[Leu65; hArg68; Cha69; Phe70; Pro73; Nle75; D- | 1375 |
| | 1Nal76]Apelin-13(65-76) | |
| {Palmitoyl}LRP [hArg][Cha]SHKGP [Nle][4-Cl—F] | Palmitoyl-Leu65; hArg68; Cha69; Nle75; 4-Cl—F76]Apelin- | 1376 |
| | 13(65-76) | |
| {Palmitoy4LRP [hArg][NMeLeu]FA [1-Nal]G[1-Nal][Nle][4-Cl—F] | Palmitoyl-[Leu65; hArg68; NMeLeu69; Phe70; Ala71; 1- | 1377 |
| {Amide} | Nal72, 74; Nle75; 4-Cl—F76]Apelin-13(65-76) | |
| {Palmitoy4LRP [hArg][NMeLeu]FA [1-Nal]G[Oic][Nle][4-Cl—F] | Palmitoyl-[Leu65; hArg68; NMeLeu69; Phe70; Ala71; 1- | 1378 |
| {Amide} | Nal72, Oic74; Nle75; 4-Cl—F76]Apelin-13(65-76) | |
| {Palmitoy4LRP [hArg][NMeLeu]FA [1-Nal]G[1-Nal][Nle][4-Cl—F] | Palmitoyl-[Leu65; hArg68; NMeLeu69; Phe70; Ala71; 1- | 1379 |
| {Amide} | Nal72, 74; Nle75; 4-Cl—F76]Apelin-13(65-76) | |

[0431] Additional numbered embodiments are shown below.

[0432] 83. The polypeptide or agonist of any one of Embodiments 54-82 wherein the C-terminus is a carboxylic acid, an ester thereof, an amide thereof or a salt thereof.

[0433] 84. The polypeptide or agonist of any one of Embodiments 54-82, wherein the C-terminus is modified with a polypeptide sequence.

[0434] 85. The polypeptide sequence of Embodiment 84 comprising a PEG derivative or serum half-life prolonging group covalently attached via a conjugation linker or without a linker.

[0435] 86. The polypeptide or agonist of Embodiment 85, wherein the conjugation linker is covalently attached to a serum half-life prolonging group or another moiety used to enhance the pharmaceutical properties of the peptide.

[0436] 87. The polypeptide or agonist of Embodiments 54-82 comprising a serum half-life prolonging group, wherein the serum half-life prolonging group is selected from the group consisting of PEG, an Fc domain, IgG, HSA, PE, an Ab, a peptide, a protein, a lipid, cholesterol, and a nanostructure, or any other serum half-life prolonging moiety.

[0437] 88. The polypeptide or agonist of Embodiment 87, wherein the serum half-life prolonging group is a serum protein binding moiety or molecule with serum protein affinity.

[0438] 89. The polypeptide or ligand of Embodiment 87, wherein the serum half-life prolonging group is a membrane protein binding moiety or molecule with membrane protein affinity.

[0439] 90. The isolated polypeptide of any one of Embodiments 15, 20, 22, 23, 35, 62, 69 or 76 in which the amino acid at “X” is replaced with the corresponding D-amino acid, amino-methyl amino acid, alpha-methyl amino acid, beta-amino acid, gamma-amino acid, amino acid isostere or equivalent bioisostere.

[0440] 91. The isolated polypeptide of Embodiments 15, 20, 22, 23, 35, 62, 69 or 76 in which the amino acid amide bond of “X” is replaced with another covalent bond.

[0441] 92. The polypeptide or agonist of any one of Embodiments 1-91 in which a covalent bond joins any two atoms present in the polypeptide to form a cyclic structure.

[0442] 93. A polypeptide or agonist having an amino acid sequence selected from the group of sequences consisting of SEQ ID NOs: 1380-1411.

TABLE 12

| | | SEQ |
|---|---|---|
| | | ID |
| AMINO ACID SEQUENCE | DESIGNATION | NO. |
| [chemical structure] | [hArg68;Cha69;Oic 74;E175;4-Cl- F77]Apelin-17(61- 77)-K1 | 1380 |
| [chemical structure] | [hArg68;Cha69;E17 4;Nle75;K177]Apel in-17(61-77) | 1381 |
| [chemical structure] | [hArg68;Cha69;E17 3;Oic74;Nle75;K17 6;4-Cl-F77]Apelin- 17(61-77) | 1382 |
| [chemical structure] | [hArg68;Cha69;E17 2;Oic74;K175;4-Cl- F77]Apelin-17(61- 77) | 1383 |
| [chemical structure] | [hArg68;Cha69;E17 1;K174;Nle75;4-Cl- F77]Apelin-17(61- 77) | 1384 |
| [chemical structure] | [hArg68;Cha69;E17 0;K173;Oic74;Nle7 5;4-Cl-F77]Apelin- 17(61-77) | 1385 |
| [chemical structure] | [hArg68;E169;K17 2;Oic74;Nle75;4- Cl-F77]Apelin- 17(61-77) | 1386 |
| [chemical structure] | [E168;Cha69;K171; Oic74;Nle75;4-Cl- F77]Apelin-17(61- 77) | 1387 |
| [chemical structure] | [E167;hArg68;Cha6 9;K170;Oic74;Nle7 5;4-Cl-F77]Apelin- 17(61-77) | 1388 |
| [chemical structure] | [E166;hArg68;K16 9;Oic74;Nle75;4- Cl-F77]Apelin- 17(61-77) | 1389 |
| [chemical structure] | [E165;K168;Cha69; Oic74;Nle75;4-Cl- F77]Apelin-17(61- 77) | 1390 |
| [chemical structure] | [E164;K167;hArg6 8;Cha69;Oic74;Nle 75;4-Cl- F77]Apelin-17(61- 77) | 1391 |
| [chemical structure] | [E163;K166;hArg6 8;Cha69;Oic74;Nle 75;4-Cl- F77]Apelin-17(61- 77) | 1392 |
| [chemical structure] | [E162;K165;hArg6 8;Cha69;Oic74;Nle 75;4-Cl- F77]Apelin-17(61- 77) | 1393 |
| [chemical structure] | [E161;K164;hArg6 8;Cha69;Oic74;Nle 75;4-Cl- F77]Apelin-17(61- 77) | 1394 |
| [chemical structure] | [hArg68;Cha69;E17 4;Nle75;4-Cl- F77]Apelin-17(61- 77)-K1 | 1395 |
| [chemical structure] | [hArg68;Cha69;E17 3;Oic74;Nle75;K17 7]Apelin-17(61-77) | 1396 |
| [chemical structure] | [hArg68;Cha69;E17 2;Oic74;Nle75;K17 6;4-Cl-F77]Apelin- 17(61-77) | 1397 |
| [chemical structure] | [hArg68;Cha69;E17 1;Oic74;K175;4-Cl- F77]Apelin-17(61- 77) | 1398 |
| [chemical structure] | [hArg68;Cha69;E17 0;K174;Nle75;4-Cl- F77]Apelin-17(61- 77) | 1399 |
| [chemical structure] | [hArg68;E169;K17 3;Oic74;Nle75;4- Cl-F77]Apelin: 17(61-77) | 1400 |
| [chemical structure] | [E168;Cha69;K172; Oic74;Nle75;4-Cl- F77]Apelin-17(61- 77) | 1401 |
| [chemical structure] | [E167;hArg68;Cha6 9;K171;Oic74;Nle7 5;4-Cl-F77]Apelin- 17(61-77) | 1402 |
| [chemical structure] | [E166;hArg68;Cha6 9;K170;Oic74;Nle7 5;4-Cl-F77]Apelin- 17(61-77) | 1403 |
| [chemical structure] | [E165;hArg68;K16 9;Oic74;Nle75;4- Cl-F77]Apelin- 17(61-77) | 1404 |
| [chemical structure] | [E164;K168;Cha69; Oic74;Nle75;4-Cl- F77]Apelin-17(61- 77) | 1405 |
| [chemical structure] | [E163;K167;hArg6 8;Cha69;Oic74;Nle 75;4-Cl- F77]Apelin-17(61- 77) | 1406 |
| [chemical structure] | [E162;K166;hArg6 8;Cha69;Oic74;Nle 75;4-Cl- F77]Apelin-17(61- 77) | 1407 |
| [chemical structure] | [E161;K165;hArg6 8;Cha69;Oic74;Nle 75;4-Cl- F77]Apelin-17(61- 77) | 1408 |
| [chemical structure] | N-to-C cyclic[hArg68;Cha6 9;Oic74;Nle75;4- Cl-F77]Apelin- 17(61-77) | 1409 |
| [chemical structure] | N-to- Ecyclic[hArg68;Ch a69;Oic74;Nle75;4- Cl-F77]Apelin- 17(61-77)-Glu | 1410 |
| [chemical structure] | N-to- Dcyclic[hArg68;Ch a69;Oic74;Nle75;4- Cl-F77]Apelin- 17(61-77)-Asp | 1411 |

[0443] 94. The isolated polypeptide or agonist of any one of Embodiments 54-93 having agonistic activity on the heart.

[0444] 95. The isolated polypeptide of Embodiment 94 wherein the agonistic activity results in increased cardiac contractility.

[0445] 49. The isolated polypeptide of Embodiment 94, wherein the agonistic activity results in an increase in dP/Dtₘₐₓ, dp/dtₘᵢₙ or heart rate.

[0446] 50. The isolated polypeptide of Embodiment 94, wherein the agonistic activity results in improved systolic or diastolic function.

[0447] 51. A method of improving cardiac contractility comprising administering the polypeptide or agonist of any one of Embodiments 54, 62, 65, 68, 69, 72, 75, 76, 79, 80, 82 or 93.

[0448] Various embodiments presented above provide a specific formula for a peptide wherein “z” can be defined as PEG or PE. There may, however, be other embodiments of these peptides, comprising the same formulaes wherein “z” can be any half-life prolonging group.

[0449] The previous description and the following working examples are illustrative and not to be construed in any way as limiting the scope of the invention.

### EXAMPLES

### Example 1

[0450] Various polypeptides have been prepared that act as APJ agonists. The polypeptides were screened for potency and metabolic stability. The sequences were randomized through techniques known in the art in which one or more amino acids may be changed while maintaining or improving the affinity, functional activity, or stability of the peptide. Nishizawa et al., Peptide Science 37: 151-157 2001; Murza et al., ChemMeDChem., 7:318-325 2012

[0451] Approximately >800 modified polypeptides were used in structure-activity relationship assays to optimize for potency and metabolic stability relative to endogenous ligand pyr apelin-13. All the compounds were screened up to 10 uM along with pyr apelin-13 used as positive control. Compounds that showed functional activity in all the SAR assays were deemed positive and re-screened. The iterative process was continued and polypeptides were further modified for optimization.

[0452] Several APJ agonist sequences are provided in Tables 12, and 13 below and in FIGS. 3 and 4. In Table 13, the brackets indicate the residue is a non-conical amino acid. Also, in Table 12, the symbols “ [symbol] ” and “ [symbol] ” may be any PEG derivative covalently attached to the APJ agonist via any of the linkers described herein or may simply be attached by a normal peptide bond (i.e., so that no linker is present). PE is pyroglutamate.

TABLE 13
APJ AGONISTS

| MOLECULE SEQUENCE/PEPTIDE NAME | SEQ ID NO. |
|---|---|
| [PE]RP[hArg][Cha][ [symbol] ]HKG[Oic][Nle]P[4-Cl—F] | 3 |
| [PE65; hArg68; Cha69; PEG70; Oic74; Nle75; 4-Cl—F77]Apelin-13(65-77) | |
| [PE]RP[hArg][NMeLeu][ [symbol] ]HKG[Oic][Nle]P[4-Cl—F] | 4 |
| [PE65; hArg68; NMeLeu69; PEG70; Oic74; Nle75; 4-Cl—F77]Apelin-13(65-77) | |
| [PE]RP[hArg][Cha]S[ [symbol] ][Oic][Nle]P[4-Cl—F] | 5 |
| [PE65; hArg68; Cha69; PEG71; Oic74; Nle75; 4-Cl—F77]Apelin-13(65-77) | |
| [PE]RP[hArg][NMeLeu]S[ [symbol] ][Oic][Nle]P[4-Cl—F] | 6 |
| [PE65; hArg68; NMeLeu69; PEG71; Oic74; Nle75; 4-Cl—F77]Apelin-13(65-77) | |
| [symbol] LRP[hArg][Cha][ [symbol] ][Oic][Nle]P[4-Cl—F] | 7 |
| PEG-[Leu65; hArg68; Cha69; PEG70; Oic74; Nle75; 4-Cl—F77]Apelin-13(65-77) | |
| [symbol] LRP[hArg][NMeLeu][ [symbol] ][Oic][Nle]P[4-Cl—F] | 8 |
| PEG-[Leu65; hArg68; NMeLeu69; PEG70; Oic74; Nle75; 4-Cl—F77]Apelin-13(65-77) | |
| [symbol] LRP[hArg][Cha]S[ [symbol] ][Oic][Nle]P[4-Cl—F] | 9 |
| PEG-[Leu65; hArg68; Cha69; PEG71; Oic74; Nle75; 4-Cl—F77]Apelin-13(65-77) | |
| [symbol] LRP[hArg][NMeLeu]S[ [symbol] ][Oic][Nle]P[4-Cl—F] | 10 |
| PEG-[Leu65; hArg68; NMeLeu69; PEG71; Oic74; Nle75; 4-Cl—F77]Apelin-13(65-77) | |
| [symbol] KFRRQRP[hArg][Cha]SHKG[Oic][Nle]P[4-Cl—F] | 11 |
| PEG-[hArg68; Cha69; Oic74; Nle75; 4-Cl—Phe77]Apelin-17(61-77) | |
| [symbol] KFRRQRP[hArg][NMeLeu]SHKG[Oic][Nle]P[4-Cl—F] | 12 |
| PEG-[hArg68; NMeLeu69; Oic74; Nle75; 4-Cl—Phe77]Apelin-17(61-77) | |
| [symbol] FRRQRP[hArg][Cha]SHKG[Oic][Nle]P[4-Cl—F] | 13 |
| PEG-[hArg68; Cha69; Oic74; Nle75; 4-Cl—Phe77]Apelin-17(62-77) | |
| [symbol] FRRQRP[hArg][NMeLeu]SHKG[Oic][Nle]P[4-Cl—F] | 14 |
| PEG-[hArg68; NMeLeu69; Oic74; Nle75; 4-Cl—Phe77]Apelin-17(62-77) | |
| [symbol] RRQRP[hArg][Cha]SHKG[Oic][Nle]P[4-Cl—F] | 15 |
| PEG-[hArg68; Cha69; Oic74; Nle75; 4-Cl—Phe77]Apelin-17(63-77) | |
| [symbol] RRQRP[hArg][NMeLeu]SHKG[Oic][Nle]P[4-Cl—F] | 16 |
| PEG-[hArg68; NMeLeu69; Oic74; Nle75; 4-Cl—Phe77]Apelin-17(63-77) | |
| [symbol] RQRP[hArg][Cha]SHKG[Oic][Nle]P[4-Cl—F] | 17 |
| PEG-[hArg68; Cha69; Oic74; Nle75; 4-Cl—Phe77]Apelin-17(64-77) | |
| [symbol] RQRP[hArg][NMeLeu]SHKG[Oic][Nle]P[4-Cl—F] | 18 |
| PEG-[hArg68; NMeLeu69; Oic74; Nle75; 4-Cl—Phe77]Apelin-17(64-77) | |
| [symbol] QRP[hArg][Cha]SHKG[Oic][Nle]P[4-Cl—F] | 20 |
| PEG-[hArg68; Cha69; Oic74; Nle75; 4-Cl—Phe77]Apelin-17(65-77) | |
| [symbol] QRP[hArg][NMeLeu]SHKG[Oic][Nle]P[4-Cl—F] | 19 |
| PEG-[hArg68; NMeLeu69; Oic74; Nle75; 4-Cl—Phe77]Apelin-17(65-77) | |
| [symbol] LRP [hArg][Cha]SHKG[Oic][Nle]P[4-Cl—F] | 21 |
| PEG-[Leu65; hArg68; Cha69; Oic74; Nle75; 4-Cl—Phe77]Apelin-17(65-77) | |
| [symbol] LRP [hArg][NMeLeu]SHKG[Oic][Nle]P[4-Cl—F] | 22 |
| PEG-[Leu65; hArg68; NMeLeu69; Oic74; Nle75; 4-Cl—Phe77]Apelin-17(65-77) | |

[0453] Additional examples of APJ agonists are provided below.

TABLE 14
ADDITIONAL APJ AGONIST EXAMPLES:
(Sequence, Chemical names and Structures are listed.)

SEQ ID NO: 23
Sequence: [PE]RP[hArg][Cha][Atz(PEG10)]HKG[Oic][Nle]P[4-Cl-F]
Chemical Name: [PE65;hArg68;Cha69;3-(1-(2-aminoethoxy(PEG9)ethyl)-1H-1,2,3-
triazol-4-yl)Ala70;Oic74;Nle75;4-Cl-F77]Apelin-13(65-77)

[chemical structure]

SEQ ID NO: 24
Sequence: Thiopropionyl(20K-mPEG)-KFRRQRP[hArg][Cha]SHKG[Oic][Nle]P[4-Cl-F]
Chemical Name: 3-((2-(3-(mPEG(20kDa))propylamino)-2-oxoethyl)thio)propanamide-
[hArg68;Cha69;Oic74;Nle75;4-Cl-Phe77]Apelin-17(61-77)

[chemical structure]

SEQ ID NO: 25
Sequence: Atz(20K-mPEG)-KFRRQRP[hArg][Cha]SHKG[Oic][Nle]P[4-Cl-F]
Chemical Name: 3-(1-(2-(mPEG(20kDa))ethyl)-1H-1,2,3-triazol-4-yl)alanine-
[hArg68;Cha69;Oic74;Nle75;4-Cl-F77]Apelin-17(61-77)

[chemical structure]

SEQ ID NO: 26
Sequence: Thiopropionyl(20K-mPEG)-LRP[hArg][Cha]SHKG[Oic][Nle]P[4-Cl-F]
Chemical Name: 3-((2-(3-(mPEG(20kDa))propylamino)-2-oxoethyl)thio)propanamide-
[Leu65;hArg68;Cha69;Oic74;Nle75;4-Cl-F77]Apelin-13(65-77)

[chemical structure]

SEQ ID NO: 27
Sequence: Atz(20K-mPEG)-LRP[hArg][Cha]SHKG[Oic][Nle]P[4-Cl-F]
Chemical Name: 3-(1-(2-(mPEG(20kDa))ethyl)-1H-1,2,3-triazol-4-yl)alanine-
[hArg68;Cha69;Oic74;Nle75;4-Cl-F77]Apelin-17(61-77)

[chemical structure]

SEQ ID NO: 28
Sequence: NPeg11-KFRRQRP[hArg][Cha]SHKG[Oic][Nle]P[4-Cl-F]
Chemical Name: 3-((2-aminoethoxy)PEG11)-propanamide-
[hArg68;Cha69;Oic74;Nle75;4-Cl-F77]Apelin-17(61-77)

[chemical structure]

[0454] In addition to agonists listed in Tables 12 and 13, and FIGS. 3 and 4 various embodiments can comprise conjugates in which a polymer, peptide, or protein is linked to a different peptide sequence; for example, wherein a Fc is linked to an APJ agonist sequence. Such compositions of matter may be prepared where the APJ agonist is attached to a vehicle through the polypeptide's N-terminus, C-terminus, backbone, or side-chain via chemical modification.

[0455] Any of the polypeptides may be attached in tandem (i.e., sequentially), with or without linkers. Any peptide described herein, either as a monomer or as multimers, may be covalently tethered, with or without linkers, to a vehicle. Any of these peptides may be derivatized.

### Example 2

[0456] Evaluation of in vitro plasma stability and identification of major in vitro metabolites of apelin peptides across multiple species, including mouse, rat, dog and human were performed.

[0457] Apelin peptides were spiked into freshly prepared mouse, rat, dog and human EDTA plasma to a final concentration of 5 μM. The plasma samples were then incubated at 37° C. over a period of 4 hr. Up to 8 time points were sampled to facilitate estimation of in vitro half life in plasma matrices. In a typical experiment, aliquot of 100 μL of plasma sample was taken from the incubation vial, followed by addition of 300 μL of MeOH containing internal standard. The quenched sample was centrifuged at 5500 g for 15 min after 15 min vortex in room temperature. The supernatant was then analyzed by high resolution LC-MS. Accurate mass full scan mass data was used for estimation of parent peptide level over the time course of 4 hr, and the data was subsequently used for estimation of in vitro half life in plasma. Using the same data set, major metabolites were also identified based on accurate mass full scan MS and MS/MS data. (metabolite data not shown). In vitro plasma stability results are shown below in Table 15.

TABLE 15

| | | | in vitro |
|---|---|---|---|
| | | | plasma |
| | | | stability % |
| | | | remaining |
| | SEQ | | at 1 h |
| | ID NO | SEQUENCE | RAT |
| Apelin-13 | 2 | QRPRLSHKGPMPF | 0.1 |
| | | | (at 15 min) |
| [PE65] | 128 | [PE]RPRLSHKGPMPF | 0.7 |
| Apelin-13 | | | (at 15 min) |
| | 29 | [PE]RP[hArg][NMeLeu] | 50 |
| | | F[Pra](NPeg9)KGP | |
| | | [Nle]f | |
| | 30 | Acetyl-[Pra](NPeg9) | 61 |
| | | LRP[hArg][NMeLeu] | |
| | | [Pra](NPeg9)HKGP[Nle] | |
| | | P[4-Cl-F] | |
| | 31 | [PE]RP[hArg][Cha] | 63 |
| | | SHKGP[Nle][1-Nal] | |
| | 32 | [PE]RP[hArg][Cha] | 64.6 |
| | | SHKGP[Nle][4-Cl-F] | |
| | 33 | [PE]RP[hArg][Cha]F | 66 |
| | | [Pra](NPeg9)KG[Oic] | |
| | | [Nle]f | |
| | 34 | [PE]RP[hArg][Cha] | 72 |
| | | [Pra](NPeg9)HKG[Oic] | |
| | | [Nle]P[4-Cl-F] | |
| | 35 | [PE]RP[hArg][NMeLeu] | 82 |
| | | [Pra](NPeg9)HKG[Oic] | |
| | | [Nle][4-Cl-F] | |
| | 36 | [PE]RP[hArg][NMeLeu] | 88 |
| | | [Pra](NPeg9)HKG[Oic] | |
| | | [Nle]P[4-Cl-F] | |
| | 37 | Acetyl-[Pra](NPeg9) | 96 |
| | | LRP[hArg][Cha[SHKGP | |
| | | [Nle][D-1Nal] | |

[0458] It should be noted in Table 15 and that all of the listed polypeptides have much greater in vitro stability than either the native (0.1% at 15 minutes) or the pyroglutamated Apelin 13 (0.7% at 15 minutes). The additionally tested peptides had between 50 and 96% at 1 hour. Additional experiments provided comparative in vitro plasma stability in four different species of plasma, i.e. mouse, rat, dog and human (FIG. 4). These results demonstrated that the APJ agonists should be able to be used in preclinical models of different species.

### Example 3

[0459] Assays were performed to determine potency and metabolic stability of the APJ agonists.

[0460] Stable CHO cell lines expressing APJ were used for cAMP assays. The cells were incubated with stimulation buffer containing HANK's buffer, forskolin and 0.5 mM IBMX in the absence or presence of various concentrations' of peptides at 37° C. for 45 min. The cAMP level was determined using a cyclic AMP kit (DiscoverX) according to the manufacturer's instructions.

[0461] To assay for GTP, membranes were prepared from stable cell lines and used to determine the efficacy/potency of the modified peptides. The optimal experimental conditions for the concentrations of GDP, MgCl2 and NaCl in the assay buffer were initially determined. The membranes were incubated with modified peptides in the assay buffer. The reaction was initiated by addition of [³⁵S] GTPγS in the absence or presence of peptides and incubated at room temperature for 90 min. Non specific binding was determined in the presence of excess cold GTPγS and was always less than 0.2% of total binding. Bound [³⁵S] GTPγS was separated from free radiolabel by filtration. The filter bound radioactivity was determined by liquid scintillation counting.

[0462] FIG. 5 shows agonist activity of 20 kDa PEGylated peptides. The (SEQ ID NO: 122), (SEQ ID NO: 123), (SEQ ID NO: 124), (SEQ ID NO: 126) and (SEQ ID NO: 127) are potent and act as a full agonist relative to 2540421 (pyr apelin-13) (SEQ ID NO: 128). Additionally, the stimulation of cAMP can be seen using either human or rat APJ stable cell lines.

[0463] FIG. 6 shows a comparison of a 525 dalton PEGylated peptide (SEQ ID NO: 23) and pyr apelin 13 (SEQ ID NO: 128). Relative to the pyr apelin-13 the 525 dalton peptide shows similar in vitro potency and efficacy, indicating that although the peptide is highly modified it retains APJ activity similar to the endogenous APJ ligand. Modification of the native apelin peptides by introducing non-canonical amino acids or introduction of PEG had no affect on functional activity in the cAMP and GTPγS assays.

### Example 4

[0464] To assess the hemodynamic cardiac function of the peptides a Langendorff isolated heart system was used. The isolated heart from rat provides broad spectrum of measurements that can include biochemical, metabolic, morphological and physiological indices. The limitations/advantages of the method include absence of neurohormonal influences, neural regulation and high coronary flows. Such limitations, however, are offset by the ability to study direct cardiac effects without systemic circulation and a host of peripheral interactions.

[0465] The reproducibility and accuracy of measurements and relatively low costs over in vivo studies for profiling drugs outweigh any limitations of this method. Therefore, this method provides excellent dose-response relationship and sheds critical insight into the pharmacological and physiological properties of the molecules of interest.

[0466] The animals were anesthetized upon administration of 50-100 mg/kg dose of sodium pentobarbital for rat via the intraperitoneal route. The heart was excised and gently cradled between fingers to avoid injury followed by lifting slightly before incising the aorta, vena cava and pulmonary vessels Immediately after excision of the heart with aorta, the heart was mounted onto the cannula in the Langendorff apparatus via the aorta. The heart was perfused with modified oxygenated Krebs-Henseleit buffer pH7.5 and equilibrated with 95% O₂/5% CO₂ at 37° C. The perfusion was performed at a constant flow of 10 ml/min and paced at 300 bpm. The pressure was measured through a pressure sensing balloon catheter inserted in the LV cavity. The intrinsic inotropy (force of muscle contraction) and lusitropy (cardiac relaxation) effects of the heart were assessed by dp/dtₘₐₓ and dp/dtₘᵢₙ.

[0467] Using the isolated Langendorff system, FIGS. 7 and 8 show a dose dependent increase in dp/dtₘₐₓ and a decrease in dp/dtₘᵢₙ, along with increases in systolic pressure for two different peptides (SEQ ID NO: 23) and (SEQ ID NO: 24) in control rats. These figures illustrate improvement in both systolic and diastolic function of normal hearts with peptides of SEQ ID NOs: 23 and 24.

### Example 5

[0468] The In vivo cardiac effects of modified peptide SEQ ID NO: 23 was assessed in control and heart failure rats. The cardiac function of healthy rats and the rats having MI (myocardial infarction)-induced heart failure was measured via the Millar PV loop system and femoral arterial pressure catheter were examined.

[0469] Male Lewis rats at 2-3 months of age were used for the studies. MI was induced by ligation of the left anterior descending coronary artery (LAD). Echocardiography was performed at 1 week post-MI for animal enrollment. If ejection fraction (EF) was more than 40% and no infarct was identified from echocardiography images, these animals were excluded from the study. The Millar PV loop catheter was inserted into the right common carotid artery and then advanced to the left ventricle (LV) for cardiovascular hemodynamic assessment. The arterial pressure catheter was inserted into a femoral artery for peripheral blood pressure monitoring.

[0470] Experiments were performed either on six-seven weeks post-MI rat, or healthy rats. The rats in each experiment were divided into 3 groups: peptide SEQ ID NO: 23 treatment, vehicle, and dobutamine as a positive control. Test articles were given intravenously via jugular vein, and 3 sets of peptide doses were used in the experiment. The peptide having SEQ ID NO: 23 was continuously dosed at 5.5, 27.5 and 55 mg/kg for 10 min at each infusion period. At the end of the experiment, the infarct size was verified by gross morphology if MI rats were used in the study.

[0471] Animals in MI groups had very similar infarct size (38-39% of LV) among the groups (results not shown). FIG. 9 shows that the mean dp/dt max increased 32% and 24.5% in healthy and MI rats, respectively. Heart rate (HR) increased up to 10.6% in MI rats at intravenous infusion of 88 μg/kg accumulative dose of peptide 2704121. No other cardiac hemodynamic changes were observed at the dose ranges from 5.5 to 88 μg/kg. No significant changes of peripheral vascular resistant measurement such as mean arterial pressure were seen at the dose ranges from 5.5 to 88 μg/kg.

### Example 6

[0472] Evaluation of in vivo pharmacokinetic profile of apelin peptide in rat was undertaken. Apelin peptides pharmacokinetic profiles were evaluated in Sprague-Dawley rats through intravenous bolus (IV) and subcutaneous (SC) administrations. In a typical IV experiment, an Apelin peptide PBS buffer solution was administered to rats via jugular vein to a final dose of 0.5 mg/kg. Blood samples collected over 24 hr period was transferred into collection tubes containing potassium EDTA and stored on ice until processed. Plasma was obtained from blood by centrifugation. After transferred into a 96-well container, plasma samples were stored in a freezer maintained at approximately −80° C. Quantitative analysis of Apelin peptide in rat plasma samples were achieved using multiple reaction monitor (MRM) mode on a LC-MS/MS system. Peptides with increased stability relative to pyr-apelin-a3 have enhanced pharmacokinetic profiles, i.e. increased half-life. Peptides conjugated with PEG have a prolonged circulating half-life relative to unconjugated peptides.

### Example 7

[0473] A series of PEGylated peptides were prepared and screened in vitro to explore the effects of PEG size and peptide valency on potency and efficacy in the GTPγS assay. In the assay 20 kDA and 40 kDA PEG were compared (FIG. 10). The potency of the 40 Kda (SEQ ID NO: 474). PEGylated peptide was reduced 5-fold relative 20 kDA (SEQ ID NO: 24) (20 kDa EC₅₀=0.252 nM vs 40 kDA EC₅₀=1.37 nM). The efficacy of the 40 Kda PEGylated peptide was also reduced relative 20 kDA (Eₘₐₓ 40 kDa=84% of 20 kDa.

[0474] Additionally mono- and multivalent bis, and tetrakis-peptide conjugated PEGS were prepared to explore peptide valency. FIG. 11 shows the effects of peptide valency on in vitro activity using 20 kDa PEGylated peptides (structures shown in FIG. 12) activity in a biological assay. Increased peptide valency had no significant effect on in vitro potency when the peptides were conjugated to 20 kDa PEG, although the effects on in vivo pharmacodynamic response have not been evaluated. The figure shows mono-bis (SEQ ID NO: 130) and tetrakis-peptides. (SEQ ID NO: 131) 20 kDa PEG-mono (SEQ ID NO: 129), bis, and tetrakis(Atz-KFRRQRP [hArg][Cha]SHKG[Oic][Nle]P[4-Cl—F]) (SEQ ID NO: 1562) molecules are approximately equipotent in the in vitro rat GTPγS assay, albeit significantly more potent than endogenous pyr apelin 13 (SEQ ID NO: 128).

[0475] Several additional PEGylated bis-peptides were investigated as shown in FIG. 13. Three of the 4 bis-peptides had increased potency relative to the mono-peptide when conjugated to low molecular weight monodispersed PEG derivatives. The shortest PEG conjugate (˜0.6 kDa PEG (SEQ ID NO: 133) had reduced potency, whereas the 1 (SEQ ID NO: 134), 1.7 (SEQ ID NO: 135) and 2.2 kDa PEG (SEQ ID NO: 136) conjugates (FIG. 14) had increased potency relative to monopeptide (SEQ ID NO: 494). The most bis-peptide conjugate is 16 pM.

[0476] The following conclusions can be reached from this example. 1) Increased PEG MW from 20 kDa to 40 kDa resulted in a conjugate with reduced potency and efficacy in the rat GTPγS assay. 2) Increased multivalency of 20 kDa PEG did not result in increased potency, suggesting that the distance between peptides when conjugated to 20 kDa PEG is not optimal. 3) The majority of bis-peptides conjugated to low MW monodispersed PEG had increased potency relative to mono-conjugated PEG.

[0477] Furthermore, it suggested that a) the distance between peptides when conjugated to either 1.7 or 2.2 kDa PEG appears optimal, b) bis-peptide PEG conjugates can offer >10-fold increased potency relative to mono-peptide conjugates and c) bis-peptide PEG conjugates may have beneficial PK properties.

### Example 8

[0478] Two discrete APJ agonists (SEQ ID NOs: 1413 and 1414) were used for site selective conjugation to an engineered Fc region of human IgG by reacting the bromoacetamide portion of the peptides with the free cysteine residue to achieve a covalent thioether linkage. The sequences of the two peptides are shown in Table 16. The Fc protein sequence is shown below.

| E53C (E384C) Sequence | | |
|---|---|---|
| (SEQ ID NO: 1415) | | |
| 1 | MDKTHTC1PPC2PAPELLGGPSVFLFPPKPKD | 30 |
| 31 | TLMISRTPEVTC3VVVDVSHEDPCVKFNWYV | 60 |
| 61 | DGVEVHNAKTKPREEQYNSTYRVVSVLTVL | 90 |
| 91 | HQDWLNGKEYKC3KVSNKALPAPIEKTISKA | 120 |
| 121 | KGQPREPQVYTLPPSRDELTKNQVSLTC4LV | 150 |
| 151 | KGFYPSDIAVEWESNGQPENNYKTTPPVLD | 180 |
| 181 | SDGSFFLYSKLTVDKSRWQQGNVFSC4SVMH | 210 |
| 211 | EALHNHYTQKSLSLSPGK | |

[0479] The underlined C indicates site of engineered cysteine and the point of covalent attachment of the APJ agonist. In the homodimer C7-C7 and C10-C10 are intermolecular disulphides, whereas C42-C102 and C148-C206 are intramolecular disulphides. Additional information related to this may be found in US Pub. No. 2012/0009205

TABLE 16
Amino acid sequences of APJ agonists for site-selective protein conjugation.

| | | SEQ |
|---|---|---|
| AMINO ACID SEQUENCE | DESIGNATION | ID NO. |
| {Bromoacetyl}[NPeg11]LRP[hArg][Cha]SHKG | Bromoacetyl-NPeg11- | 1413 |
| [Oic][Nle]P[4-Cl—F]{FreeAcid} | [Leu65; hArg68; Cha69; Oic74; | |
| | Nle75; 4-Cl—F77]Apelin-13(65-77) | |
| {Bromoacetyl} [NPeg11]KFRR QRP[hArg][Cha] | Bromoacetyl-NPeg11- | 1414 |
| SHKG[Oic] [Nle]P[4-Cl—F] {Free Acid} | [hArg68; Cha69; Oic74; Nle75; 4- | |
| | Cl—F77]Apelin-17(61-77) | |
| {Bromoacetyl}[NPeg11]F[hArg][hArg]Q[hArg] | Bromoacetyl-NPeg11- | 1559 |
| P[hArg][Cha]SHKG[Oic][Nle]P[4-Cl—F] | [hArg63, 64, 66, 68; Cha69; Oic74; | |
| {FreeAcid} | Nle75; 4-Cl—F77]Apelin-17(61-77) | |
| {Bromoacetyl}[NPeg11]OF[hArg][hArg]Q | Bromoacetyl-NPeg11- | 1426 |
| [hArg]P[hArg][Cha]SHKG[Oic][Nle]P[4-Cl—F] | [Orn61; hArg63, 64 66, 68; Cha69; | |
| {FreeAcid} | Oic74; Nle75; 4-Cl—F77]Apelin- | |
| | 17(61-77) | |
| {Bromoacetyl}[NPeg11]QRP[hArg][Cha] | Bromoacetyl-NPeg11- | 1427 |
| SHKG[Oic][Nle]P[4-Cl—F]{FreeAcid} | [hArg68; Cha69; Oic74; Nle75; | |
| | 4-Cl—F77]Apelin-13(65-77) | |
| {Bromoacetyl}GGLRP[hArg][Cha]SHKG[Oic] | Bromoacetyl-GG- | 1428 |
| [Nle]P[4-Cl—F]{FreeAcid} | [Leu65; hArg68; Cha69; Oic74; | |
| | Nle75; 4-Cl—F77]Apelin-13(65-77) | |
| {Bromoacetyl}GGF[hArg][hArg]Q[hArg] | Bromoacetyl-GG- | 1429 |
| P[hArg][Cha]SHKG[Oic][Nle]P[4-Cl—F] | [hArg63, 64, 66, 68; Cha69; Oic74; | |
| {FreeAcid} | Nle75; 4-Cl—F77]Apelin-17(61-77) | |
| {Bromoacetyl}GGOF[hArg][hArg]Q[hArg] | Bromoacetyl-GG- | 1430 |
| P[hArg][Cha]SHKG[Oic][Nle]P[4-Cl—F] | [Orn61; hArg63, 64 66, 68; Cha69; | |
| {FreeAcid} | Oic74; Nle75; 4-Cl—F77]Apelin- | |
| | 17(61-77) | |
| {Bromoacetyl}GGQRP[hArg][Cha]SHKG | Bromoacetyl-GG- | 1431 |
| [Oic][Nle]P[4-Cl—F]{FreeAcid} | [hArg68; Cha69; Oic74; Nle75; | |
| | 4-Cl—F77]Apelin-13(65-77) | |
| {Bromoacetyl}[Aeea]LRP[hArg][Cha]SHKG | Bromoacetyl-Aeea- | 1432 |
| [Oic][Nle]P[4-Cl—F]{FreeAcid} | [Leu65; hArg68; Cha69; Oic74; | |
| | Nle75; 4-Cl—F77]Apelin-13(65-77) | |
| {Bromoacetyl}[Aeea]F[hArg][hArg]Q[hArg] | Bromoacetyl-Aeea- | 1433 |
| P[hArg][Cha]SHKG[Oic][Nle]P[4-Cl—F] | [hArg63, 64, 66, 68; Cha69; Oic74; | |
| {FreeAcid} | Nle75; 4-Cl—F77]Apelin-17(61-77) | |
| {Bromoacetyl}[Aeea]OF[hArg][hArg]Q[hArg] | Bromoacetyl-Aeea- | 1434 |
| P[hArg][Cha]SHKG[Oic][Nle]P[4-Cl—F] | [Orn61; hArg63, 64 66, 68; Cha69; | |
| {FreeAcid} | Oic74; Nle75; 4-Cl—F77]Apelin- | |
| | 17(61-77) | |
| {Bromoacetyl}[Aeea]QRP[hArg][Cha]SHKG | Bromoacetyl-Aeea- | 1435 |
| [Oic][Nle]P[4-Cl—F]{FreeAcid} | [hArg68; Cha69; Oic74; Nle75; | |
| | 4-Cl—F77]Apelin-13(65-77) | |
| {Bromoacetyl}GSGSLRP[hArg][Cha]SHKG | Bromoacetyl-GSGS- | 1436 |
| [Oic][Nle]P[4-Cl—F]{FreeAcid} | [Leu65; hArg68; Cha69; Oic74; | |
| | Nle75; 4-Cl—F77]Apelin-13(65-77) | |
| {Bromoacetyl}GSGSF[hArg][hArg]Q[hArg] | Bromoacetyl-GSGS- | 1437 |
| P[hArg][Cha]SHKG[Oic][Nle]P [4-Cl—F] | [hArg63, 64, 66, 68; Cha69; Oic74; | |
| {FreeAcid} | Nle75; 4-Cl—F77]Apelin-17(61-77) | |
| {Bromoacetyl}GSGSOF[hArg][hArg]Q[hArg] | Bromoacetyl-GSGS- | 1438 |
| P[hArg][Cha]SHKG[Oic][Nle]P[4-Cl—F] | [Orn61; hArg63, 64 66, 68; Cha69; | |
| {FreeAcid} | Oic74; Nle75; 4-Cl—F77]Apelin- | |
| | 17(61-77) | |
| {Bromoacetyl}GSGSQRP[hArg][Cha]SHKG | Bromoacetyl-GSGS- | 1439 |
| [Oic][Nle]P[4-Cl—F]{FreeAcid} | [hArg68; Cha69; Oic74; Nle75; | |
| | 4-Cl—F77]Apelin-13(65-77) | |
| {Bromoacetyl}LRP[hArg][Cha]SHKG[Oic] | Bromoacetyl- | 1450 |
| [Nle]P[4-Cl—F]{FreeAcid} | [Leu65; hArg68; Cha69; Oic74; | |
| | Nle75; 4-Cl—F77]Apelin-13(65-77) | |
| {Bromoacetyl}F[hArg][hArg]Q[hArg]P[hArg] | Bromoacetyl- | 1451 |
| [Cha]SHKG[Oic][Nle]P[4-Cl—F] | [hArg63, 64, 66, 68; Cha69; Oic74; | |
| {FreeAcid} | Nle75; 4-Cl—F77]Apelin-17(61-77) | |
| {Bromoacetyl}OF[hArg][hArg]Q[hArg]P[hArg] | Bromoacetyl- | 1452 |
| [Cha]SHKG[Oic][Nle]P[4-Cl—F] | [Orn61; hArg63, 64 66, 68; Cha69; | |
| {FreeAcid} | Oic74; Nle75; 4-Cl—F77]Apelin- | |
| | 17(61-77) | |
| {Bromoacetyl}QRP[hArg][Cha]SHKG[Oic] | Bromoacetyl- | 1453 |
| [Nle]P[4-Cl—F]{FreeAcid} | [hArg68; Cha69; Oic74; Nle75; | |
| | 4-Cl—F77]Apelin-13(65-77) | |

[0480] The Fc protein forms a homodimer upon folding and thus contains two engineered reactive sites per folded protein. Each Fc-homodimer conjugate will ideally contain two copies of APJ agonist. The conjugates were named FcE52C-ap13 and FcE52C-ap17 (13 and 17 are the number of residues in the peptide, 1× for 1 peptide, 2× for two peptides covalently bound to Fc through a thioether linkage).

[0481] Results of this experiment are shown in FIG. 15 with comparison of the activity of the Fc conjugates to SEQ ID NO: 128. Two peptide APJ agonists of different lengths were successfully conjugated to a cysteine engineered Fc protein in a site-selective manner. Fc-conjugates containing one peptide and two peptides per Fc protein were separated by chromatography. Peptide-protein conjugates maintain potency and efficacy at human and rat APJ receptors. The conjugates were compared to wild type pyr-apelin-13 (SEQ ID NO: 128) at both human and rat APJ and were found to have higher or equivalent potency and efficacy.

[0482] Results of another experiment using several protein conjugates of Table 17 are shown in FIG. 16. Results of this experiment are shown in FIG. 16 with comparison of the activity of the Fc conjugates to SEQ ID NO: 128. Peptide APJ agonists of varying lengths of spacers between peptide and conjugation linker were successfully conjugated to two different cysteine engineered Fc proteins in a site-selective manner. Fc-conjugates containing one peptide and two peptides per Fc protein were separated by chromatography. Peptide-protein conjugates were tested against human APJ receptor and maintain potency and efficacy. The conjugates were compared to wild type pyr-apelin-13 (SEQ ID NO: 128) and were found to have higher or equivalent potency and efficacy.

TABLE 17
PROTEIN CONJUGATES

| DESIGNATION | SEQ ID NO. |
|---|---|
| Fc (E384C) {acetamide}-QRP[hArg][Cha]SHKG[Oic][Nle]P[4-Cl—F]) | 1454 |
| Fc (T487C)-{acetamide}-QRP[hArg][Cha]SHKG[Oic][Nle]P[4-Cl—F] | 1455 |
| Fc (E384C)-{acetamide}-GG-QRP[hArg][Cha]SHKG[Oic][Nle]P[4-Cl—F] | 1456 |
| Fc (T487C)-{acetamide}-GG-QRP[hArg][Cha]SHKG[Oic][Nle]P[4-Cl—F] | 1457 |
| Fc (E384C)-{acetamide}-AEEA-QRP[hArg][Cha]SHKG[Oic][Nle]P[4-Cl—F] | 1458 |
| Fc (T487C)-{oacetamide}-AEEA-QRP[hArg][Cha]SHKG[Oic][Nle]P[4-Cl—F] | 1459 |
| Fc (E384C)-{acetamide}-PEG₁₁-QRP[hArg][Cha]SHKG[Oic][Nle]P[4-Cl—F] | 1460 |
| Fc (T487C)-{acetamide}-PEG₁₁-QRP[hArg][Cha]SHKG[Oic][Nle]P[4-Cl—F] | 1461 |

[0483] The following is the sequence for huFc(T487C) (SEQ ID NO: 1462):

DKTHTCPPCPAPELLGGPSVFLFPPKPKDTLMISRTPEVTCVVVD
VSHEDPEVKFNWYVDGVEVHNAKTKPREEQYNSTYRVVSVLTVLH
QDWLNGKEYKCKVSNKALPAPIEKTISKAKGQPREPQVYTLPPSR
EEMCKNQVSLTCLVKGFYPSDIAVEWESNGQPENNYKTTPPVLDS
DGSFFLYSKLTVDKSRWQQGNVFSCSVMHEALHNHYTQKSLSLSP
GK

### Example 9

[0484] Additional peptides that can be used as apelin agonists can be found in Table 18.

TABLE 18

| AMINO ACID SEQUENCE | DESIGNATION | SEQ ID NO. |
|---|---|---|
| {Acetyl}[NPeg11]F[hArg][hArg]Q[hArg] | Acetyl-[NPeg1161; hArg63, 64, 66, | 1463 |
| P[hArg][Cha]SHKG[Oic][Nle]P[4-Cl—F] | 68; Cha69; Oic74; Nle75; 4-Cl— | |
| {FreeAcid} | F77]Apelin-17(61-77) | |
| {Acetyl}[NPeg11]F[hArg][hArg]Q[hArg] | Acetyl-[NPeg1161; hArg63, 64, 66, | 1464 |
| P[hArg][Cha]SHKG[Oic][Nle][1-Nal] | 68; Cha69; Oic74; Nle75; 1-Nal76; | |
| [4-Cl—F]{FreeAcid} | 4-Cl—F77]Apelin-17(61-77) | |
| {Acetyl}[NPeg11]F[hArg][hArg]L[hArg] | Acetyl-[NPeg1161; hArg63, 64, 66, | 1465 |
| P[hArg][Cha]SHKG[Oic][Nle]P[4-Cl—F] | 68; Leu65; Cha69; Oic74; Nle75; | |
| {FreeAcid} | 4-Cl—F77]Apelin-17(61-77) | |
| {Acetyl}[NPeg11]F[hArg][hArg][Nle] | Acetyl-[NPeg1161; hArg63, 64, 66, | 1466 |
| [hArg]P[hArg][Cha]SHKG[Oic][Nle]P | 68; Nle65, 75; Cha69; Oic74; 4- | |
| [4-Cl—F]{FreeAcid} | Cl—F77]Apelin-17(61-77) | |
| {Acetyl}[NPeg11]F[hArg][hArg]Q[hArg] | Acetyl-[NPeg1161; hArg63, 64, 66, | 1467 |
| P[hArg][Cha][NMeSer]HKG[Oic][Nle]P | 68; Cha69; NMeSer70; Oic74; | |
| [4-Cl—F]{FreeAcid} | Nle75; 4-Cl—F77]Apelin-17(61-77) | |
| {Acetyl}[NPeg11]F[hArg][hArg]Q[hArg] | Acetyl-[NPeg1161; hArg63, 64, 66, | 1468 |
| P[hArg][Cha]S[2-Nal]KG[Oic][Nle]P[4- | 68; Cha69; 2-Nal71; Oic74; Nle75; | |
| Cl—F]{FreeAcid} | 4-Cl—F77]Apelin-17(61-77) | |
| {Acetyl}[NPeg11]F[hArg][hArg]Q[hArg] | Acetyl-[NPeg1161; hArg63, 64, 66, | 1469 |
| P[hArg][Cha]THKG[Oic][Nle]P[4-Cl—F] | 68; Cha69; Thr70; Oic74; Nle75; 4- | |
| {FreeAcid} | Cl—F77]Apelin-17(61-77) | |
| {Acetyl}[NPeg11]F[hArg][hArg]L[hArg] | Acetyl-[NPeg1161; hArg63, 64, 66, | 1470 |
| P[hArg][Cha]S[2-Nal]KG[Oic][Nle][1- | 68; Nle75; 1-Leu65; Cha69; 2- | |
| Nal][4-Cl—F]{FreeAcid} | Nal71; Oic74; Nal76; 4-Cl—F77] | |
| | Apelin-17(61-77) | |
| {Acetyl}[NPeg11]F[hArg][hArg]L[hArg] | Acetyl-[NPeg1161; hArg63, 64, 66, | 1471 |
| P[hArg][Cha]T[2-Nal]KG[Oic][Nle][1- | 68; Leu65; Cha69; Thr70; 2-Nal71; | |
| Nal][4-Cl—F]{FreeAcid} | Oic74; Nle75; 1-Nal76; 4-Cl—F77] | |
| | Apelin-17(61-77) | |
| {Acetyl}[NPeg11]F[hArg][hArg]L[hArg] | Acetyl-[NPeg1161; hArg63, 64, 66, | 1472 |
| P[hArg][Cha]SAKG[Oic][Nle][1-Nal][4- | 68; Leu65; Cha69; Ala71; Oic74; | |
| Cl—F]{FreeAcid} | Nle75; 1-Nal76; 4-Cl—F77]Apelin- | |
| | 17(61-77) | |
| {Acetyl}[NPeg11]F[hArg][hArg]L[hArg] | Acetyl-[NPeg1161; hArg63, 64, 66, | 1473 |
| P[hArg][Cha]SAKG[Oic][Nle]P[4-Cl—F] | 68; Leu65; Cha69; Ala71; Oic74; | |
| {FreeAcid} | Nle75; 4-Cl—F77]Apelin-17(61-77) | |
| {Acetyl}[NPeg11]F[hArg][hArg]Q[hArg] | Acetyl-[NPeg1161; hArg63, 64, 66, | 1474 |
| P[hArg][Cha]SHKG[Oic][Nle]P[4-Cl—F] | 68; Cha69; Oic74; Nle75; 4-Cl— | |
| {FreeAcid} | F77]Apelin-17(61-77) | |
| {Acetyl}[NPeg11]F[hArg][hArg]Q[hArg] | Acetyl-[NPeg1161; hArg63, 64, 66, | 1475 |
| P[hArg][Cha][Abu]HKG[Oic][Nle]P[4- | 68; Cha69; Abu70; Oic74; Nle75; 4- | |
| Cl—F]{FreeAcid} | Cl—F77]Apelin-17(61-77) | |
| {Acetyl}[NPeg11]F[hArg][hArg]Q[hArg] | Acetyl-[NPeg1161; hArg63, 64, 66, | 1476 |
| P[hArg][Cha][Nle]HKG[Oic][Nle]P[4- | 68; Cha69; Nle70, 75; Oic74; 4- | |
| Cl—F]{FreeAcid} | Cl—F77]Apelin-17(61-77) | |
| {Acetyl}[NPeg11]F[hArg][hArg]Q[hArg] | Acetyl-[NPeg1161; hArg63, 64, 66, | 1477 |
| P[hArg][Cha]VHKG[Ole][Nle]P[4-Cl— | 68; Cha69; Val70; Oic74; Nle75; 4- | |
| F]{FreeAcid} | Cl—F77]Apelin-17(61-77) | |
| {Acetyl}[NPeg11]F[hArg][hArg]Q[hArg] | Acetyl-[NPeg1161; hArg63, 64, 66, | 1478 |
| P[hArg][Cha]YHKG[Oic][Nle]P[4-Cl— | 68; Cha69; Tyr70; Oic74; Nle75; 4- | |
| F]{FreeAcid} | Cl—F77]Apelin-17(61-77) | |
| {Acetyl}[NPeg11]F[hArg][hArg]Q[hArg] | Acetyl-[NPeg1161; hArg63, 64, 66, | 1479 |
| P[hArg][Cha]LHKG[Oic][Nle]P[4-Cl— | 68; Cha69; Leu70; Oic74; Nle75; 4- | |
| F]{FreeAcid} | Cl—F77]Apelin-17(61-77) | |
| {Acetyl}[NPeg11]F[hArg][hArg]Q[hArg] | Acetyl-[NPeg1161; hArg63, 64, 66, | 1480 |
| P[hArg][Cha]IHKG[Oic][Nle]P[4-Cl— | 68; Cha69; Ile70; Oic74; Nle75; 4- | |
| F]{FreeAcid} | Cl—F77]Apelin-17(61-77) | |
| {Acetyl}[NPeg11]F[hArg][hArg]Q[hArg] | Acetyl-[NPeg1161; hArg63, 64, 66, | 1481 |
| P[hArg][Cha][1-Nal]HKG[Oic][Nle]P[4- | 68; Cha69; 1-Nal70; Oic74; Nle75; | |
| Cl—F]{FreeAcid} | 4-Cl—F77]Apelin-17(61-77) | |
| {Acetyl}[NPeg11]F[hArg][hArg]Q[hArg] | Acetyl-[NPeg1161; hArg63, 64, 66, | 1482 |
| P[hArg][Cha][2-Nal]HKG[Oic][Nle]P[4- | 68; Cha69; 2-Nal70; Oic74; Nle75; | |
| Cl—F]{FreeAcid} | 4-Cl—F77]Apelin-17(61-77) | |
| {Acetyl}[NPeg11]F[hArg][hArg]Q[hArg] | Acetyl-[NPeg1161; hArg63, 64, 66, | 1483 |
| P[hArg][Cha][Bip]HKG[Oic][Nle]P[4- | 68; Cha69; Bip70; Oic74; Nle75; 4- | |
| Cl—F]{FreeAcid} | Cl—F77]Apelin-17(61-77) | |
| {Acetyl}[NPeg11]F[hArg][hArg]Q[hArg] | Acetyl-[NPeg1161; hArg63, 64, 66, | 1484 |
| P[hArg][Cha]FHKG[Oic][Nle]P[4-Cl— | 68; Cha69; Phe70; Oic74; Nle75; 4- | |
| F]{FreeAcid} | Cl—F77]Apelin-17(61-77) | |
| {Acetyl}[NPeg11]F[hArg][hArg]Q[hArg] | Acetyl-[NPeg1161; hArg63, 64, 66, | 1485 |
| P[hArg][Cha]SHKG[Oic][Nle]P[4-Cl— | 68; Cha69; Oic74; Nle75; 4-Cl— | |
| F]{FreeAcid} | F77]Apelin-17(61-77) | |
| {Acetyl}[NPeg11]F[hArg][hArg]Q[hArg] | Acetyl-[NPeg1161; hArg63, 64, 66, | 1486 |
| P[hArg][Cha]SAKG[Oic][Nle]P[4-Cl— | 68; Cha69; Ala71; Oic74; Nle75; 4- | |
| F]{FreeAcid} | Cl—F77]Apelin-17(61-77) | |
| {Acetyl}[NPeg11]F[hArg][hArg]Q[hArg] | Acetyl-[NPeg1161; hArg63, 64, 66, | 1487 |
| P[hArg][Cha]S[Abu]KG[Oic][Nle]P[4- | 68; Cha69; Abu71; Oic74; Nle75; 4- | |
| Cl—F]{FreeAcid} | Cl—F77]Apelin-17(61-77) | |
| {Acetyl}[NPeg11]F[hArg][hArg]Q[hArg] | Acetyl-[NPeg1161; hArg63, 64, 66, | 1488 |
| P[hArg][Cha]S[Nle]KG[Oic][Nle]P[4- | 68; Cha69; Nle71, 75; Oic74; 4- | |
| Cl—F]{FreeAcid} | Cl—F77]Apelin-17(61-77) | |
| {Acetyl}[NPeg11]F[hArg][hArg]Q[hArg] | Acetyl-[NPeg1161; hArg63, 64, 66, | 1489 |
| P[hArg][Cha]SVKG[Oic][Nle]P[4-Cl— | 68; Cha69; Val71; Oic74; Nle75; 4- | |
| F]{FreeAcid} | Cl—F77]Apelin-17(61-77) | |
| {Acetyl}[NPeg11]F[hArg][hArg]Q[hArg] | Acetyl-[NPeg1161; hArg63, 64, 66, | 1490 |
| P[hArg][Cha]SYKG[Oic][Nle]P[4-Cl— | 68; Cha69; Tyr71; Oic74; Nle75; 4- | |
| F]{FreeAcid} | Cl—F77]Apelin-17(61-77) | |
| {Acetyl}[NPeg11]F[hArg][hArg]Q[hArg] | Acetyl-[NPeg1161; hArg63, 64, 66, | 1491 |
| P[hArg][Cha]S[Cha]KG[Oic][Nle]P[4- | 68; Cha69, 71; Oic74; Nle75; 4- | |
| Cl—F]{FreeAcid} | Cl—F77]Apelin-17(61-77) | |
| {Acetyl}[NPeg11]F[hArg][hArg]Q[hArg] | Acetyl-[NPeg1161; hArg63, 64, 66, | 1492 |
| P[hArg][Cha]SLKG[Oic][Nle]P[4-Cl— | 68; Cha69; Leu71; Oic74; Nle75; 4- | |
| F]{FreeAcid} | Cl—F77]Apelin-17(61-77) | |
| {Acetyl}[NPeg11]F[hArg][hArg]Q[hArg] | Acetyl-[NPeg1161; hArg63, 64, 66, | 1493 |
| P[hArg][Cha]SIKG[Oic][Nle]P[4-Cl— | 68; Cha69; Ile71; Oic74; Nle75; 4- | |
| F]{FreeAcid} | Cl—F77]Apelin-17(61-77) | |
| {Acetyl}[NPeg11]F[hArg][hArg]Q[hArg] | Acetyl-[NPeg1161; hArg63, 64, 66, | 1494 |
| P[hArg][Cha]SFKG[Oic][Nle]P[4-Cl— | 68; Cha69; Phe71; Oic74; Nle75; 4- | |
| F]{FreeAcid} | Cl—F77]Apelin-17(61-77) | |
| {Acetyl}[NPeg11]F[hArg][hArg]Q[hArg] | Acetyl-[NPeg1161; hArg63, 64, 66, | 1495 |
| P[hArg][Cha]S [2Pal]KG[Oic][Nle]P[4- | 68; Cha69; 2Pal71; Oic74; Nle75; | |
| Cl—F]{FreeAcid} | 4-Cl—F77]Apelin-17(61-77) | |
| {Acetyl}[NPeg11]F[hArg][hArg]Q[hArg] | Acetyl-[NPeg1161; hArg63, 64, 66, | 1496 |
| P[hArg][Cha]S[1-Nal]KG[Oic][Nle]P[4- | 68; Cha69; 1-Nal71; Oic74; Nle75; | |
| Cl—F]{FreeAcid} | 4-Cl—F77]Apelin-17(61-77) | |
| {Acetyl}[NPeg11]F[hArg][hArg]Q[hArg] | Acetyl-[NPeg1161; hArg63, 64, 66, | 1497 |
| P[hArg][Cha]S[3Pal]KG[Oic][Nle]P[4- | 68; Cha69; 3Pal71; Oic74; Nle75; 4- | |
| Cl—F]{FreeAcid} | Cl—F77]Apelin-17(61-77) | |
| {Acetyl}[NPeg11]F[hArg][hArg]Q[hArg] | Acetyl-[NPeg1161; hArg63, 64, 66, | 1498 |
| P[hArg][Cha]S[Bip]KG[Oic][Nle]P[4- | 68; Cha69; Bip71; Oic74; Nle75; 4- | |
| Cl—F]{FreeAcid} | Cl—F77]Apelin-17(61-77) | |
| {Acetyl}[NPeg11][Orn]F[hArg][hArg]Q | Acetyl-NPeg11-[Orn61; hArg63, | 1499 |
| [hArg]P[hArg][Cha]SHKG[Oic][Nle]P[4- | 64, 66, 68; Cha69; Oic74; Nle75; 4- | |
| Cl—F]{FreeAcid} | Cl—F77]Apelin-17(61-77) | |
| {Acetyl}[NPeg11][Orn]F[hArg][hArg]Q | Acetyl-NPeg11-[Orn61; hArg63, | 1505 |
| [hArg]P[hArg][Cha]SHKG[Oic][Nle][1- | 64, 66, 68; Cha69; Oic74; Nle75; 1- | |
| Nal][4-Cl—F]{FreeAcid} | Nal76; 4-Cl—F77]Apelin-17(61-77) | |
| {Acetyl}[NPeg11][Orn]F[hArg][hArg]L | Acetyl-NPeg11-[Orn61; hArg63, | 1500 |
| [hArg]P[hArg][Cha]SHKG[Oic][Nle]P | 64, 66, 68; Leu65; Cha69; Oic74; | |
| [4-Cl—F]{FreeAcid} | Nle75; 4-Cl—F77]Apelin-17(61-77) | |
| {Acetyl}[NPeg11][Orn]F[hArg][hArg] | Acetyl-NPeg11-[Orn61; hArg63, | 1501 |
| [Nle][hArg]P[hArg][Cha]SHKG[Oic] | 64, 66, 68; Nle65, 75; Cha69; Oic74; | |
| [Nle]P[4-Cl—F]{FreeAcid} | 4-Cl—F77]Apelin-17(61-77) | |
| {Acetyl}[NPeg11][Orn]F[hArg][hArg]Q | Acetyl-NPeg11-[Orn61; hArg63, 64, | 1502 |
| [hArg]P[hArg][Cha][NMeSer]HKG[Oic] | 66, 68; Cha69; NMeSer70; Oic74; | |
| [Nle]P[4-Cl—F]{FreeAcid} | Nle75; 4-Cl—F77]Apelin-17(61-77) | |
| {Acetyl}[NPeg11][Orn]F[hArg][hArg]Q | Acetyl-NPeg11-[Orn61; hArg63, 64, | 1503 |
| [hArg]P[hArg][Cha]S[2-Nal]KG[Oic] | 66, 68; Cha69; 2-Nal71; Oic74; | |
| [Nle]P[4-Cl—F]{FreeAcid} | Nle75; 4-Cl—F77]Apelin-17(61-77) | |
| {Acetyl}[NPeg11][Orn]F[hArg][hArg]Q | Acetyl-NPeg11-[Orn61; hArg63, 64, | 1504 |
| [hArg]P[hArg][Cha]THKG[Oic][Nle]P | 66, 68; Cha69; Thr70; Oic74; Nle75; | |
| [4-Cl—F]{FreeAcid} | 4-Cl—F77]Apelin-17(61-77) | |
| {Acetyl}[NPeg11][Orn]F[hArg][hArg]L | Acetyl-NPeg11-[Orn61; hArg63, 64, | 1506 |
| [hArg]P[hArg][Cha]S[2-Nal]KG[Oic] | 66, 68; Leu65; Cha69; 2-Nal71; | |
| [Nle][1-Nal][4-Cl—F]{FreeAcid} | Oic74; Nle75; 1-Nal76; 4-Cl—F77] | |
| | Apelin-17(61-77) | |
| {Acetyl}[NPeg11][Orn]F[hArg][hArg]L | Acetyl-NPeg11-[Orn61; hArg63, 64, | 1507 |
| [hArg]P[hArg][Cha]T[2-Nal]KG[Oic] | 66, 68; Leu65; Cha69; Thr70; 2- | |
| [Nle][1-Nal][4-Cl—F]{FreeAcid} | Nal71; Oic74; Nle75; 1-Nal76; 4- | |
| | Cl—F77]Apelin-17(61-77) | |
| {Acetyl}[NPeg11][Orn]F[hArg][hArg]L | Acetyl-NPeg11-[Orn61; hArg63, 64, | 1508 |
| [hArg]P[hArg][Cha]SAKG[Oic][Nle][1- | 66, 68; Leu65; Cha69; Ala71; | |
| Nal][4-Cl—F]{FreeAcid} | Oic74; Nle75; 1-Nal76; 4-Cl—F77] | |
| | Apelin-17(61-77) | |
| {Acetyl}[NPeg11][Orn]F[hArg][hArg]L | Acetyl-NPeg11-[Orn61; hArg63, 64, | 1509 |
| [hArg]P[hArg][Cha]SAKG[Oic][Nle]P[4- | 66, 68; Leu65; Cha69; Ala71; | |
| Cl—F]{FreeAcid} | Oic74; Nle75; 4-Cl—F77]Apelin- | |
| | 17(61-77) | |
| {Acetyl}[NPeg11][Orn]F[hArg][hArg]Q | Acetyl-NPeg11-[Orn61; hArg63, 64, | 1510 |
| [hArg]P[hArg][Cha]SHKG[Oic][Nle]P[4- | 66, 68; Cha69; Oic74; Nle75; 4- | |
| Cl—F]{FreeAcid} | Cl—F77]Apelin-17(61-77) | |
| {Acetyl}[NPeg11][Orn]F[hArg][hArg]Q | Acetyl-NPeg11-[Orn61; hArg63, 64, | 1511 |
| [hArg]P[hArg][Cha][Abu]HKG[Oic][Nle] | 66, 68; Cha69; Abu70; Oic74; Nle75; | |
| P[4-Cl—F]{FreeAcid} | 4-Cl—F77]Apelin-17(61-77) | |
| {Acetyl}[NPeg11][Orn]F[hArg][hArg]Q | Acetyl-NPeg11-[Orn61; hArg63, 64, | 1512 |
| [hArg]P[hArg][Cha][Nle]HKG[Oic] | 66, 68; Cha69; Nle70, 75; Oic74; 4- | |
| [Nle]P[4-Cl—F]{FreeAcid} | Cl—F77]Apelin-17(61-77) | |
| {Acetyl}[NPeg11][Orn]F[hArg][hArg]Q | Acetyl-NPeg11-[Orn61; hArg63, 64, | 1513 |
| [hArg]P[hArg][Cha]VHKG[Oic][Nle]P | 66, 68; Cha69; Val70; Oic74; Nle75; | |
| [4-Cl—F]{FreeAcid} | 4-Cl—F77]Apelin-17(61-77) | |
| {Acetyl}[NPeg11][Orn]F[hArg][hArg]Q | Acetyl-NPeg11-[Orn61; hArg63, 64, | 1514 |
| [hArg]P[hArg][Cha]YHKG[Oic][Nle]P | 66, 68; Cha69; Tyr70; Oic74; Nle75; | |
| [4-Cl—F]{FreeAcid} | 4-Cl—F77]Apelin-17(61-77) | |
| {Acetyl}[NPeg11][Orn]F[hArg][hArg]Q | Acetyl-NPeg11-[Orn61; hArg63, 64, | 1515 |
| [hArg]P[hArg][Cha]LHKG [Oic][Nle]P | 66, 68; Cha69; Leu70; Oic74; Nle75; | |
| [4-Cl—F]{FreeAcid} | 4-Cl—F77]Apelin-17(61-77) | |
| {Acetyl}[NPeg11][Orn]F[hArg][hArg]Q | Acetyl-NPeg11-[Orn61; hArg63, 64, | 1516 |
| [hArg]P[hArg][Cha]IHKG[Oic][Nle]P | 66, 68; Cha69; Ile70; Oic74; Nle75; | |
| [4-Cl—F]{FreeAcid} | 4-Cl—F77]Apelin-17(61-77) | |
| {Acetyl}[NPeg11][Orn]F[hArg][hArg]Q | Acetyl-NPeg11-[Orn61; hArg63, 64, | 1517 |
| [hArg]P[hArg][Cha][1-Nal]HKG[Oic] | 66, 68; Cha69; 1-Nal70; Oic74; | |
| [Nle]P[4-Cl—F]{FreeAcid} | Nle75; 4-Cl—F77]Apelin-17(61-77) | |
| {Acetyl}[NPeg11][Orn]F[hArg][hArg]Q | Acetyl-NPeg11-[Orn61; hArg63, 64, | 1518 |
| [hArg]P[hArg][Cha][2-Nal]HKG[Oic] | 66, 68; Cha69; 2-Nal70; Oic74; | |
| [Nle]P[4-Cl—F]{FreeAcid} | Nle75; 4-Cl—F77]Apelin-17(61-77) | |
| {Acetyl}[NPeg11][Orn]F[hArg][hArg]Q | Acetyl-NPeg11-[Orn61; hArg63, 64, | 1519 |
| [hArg]P[hArg][Cha][Bip]HKG[Oic] | 66, 68; Cha69; Bip70; Oic74; Nle75; | |
| [Nle]P[4-Cl—F]{FreeAcid} | 4-Cl—F77]Apelin-17(61-77) | |
| {Acetyl}[NPeg11][Orn]F[hArg][hArg]Q | Acetyl-NPeg11-[Orn61; hArg63, 64, | 1520 |
| [hArg]P[hArg][Cha]FHKG[Oic][Nle]P | 66, 68; Cha69; Phe70; Oic74; Nle75; | |
| [4-Cl—F]{FreeAcid} | 4-Cl—F77]Apelin-17(61-77) | |
| {Acetyl}[NPeg11][Orn]F[hArg][hArg]Q | Acetyl-NPeg11-[Orn61; hArg63, 64, | 1521 |
| [hArg]P[hArg][Cha]SHKG[Oic][Nle]P | 66, 68; Cha69; Oic74; Nle75; 4- | |
| [4-Cl—F]{FreeAcid} | Cl—F77]Apelin-17(61-77) | |
| {Acetyl}[NPeg11][Orn]F[hArg][hArg]Q | Acetyl-NPeg11-[Orn61; hArg63, 64, | 1522 |
| [hArg]P[hArg][Cha]SAKG[Oic][Nle]P | 66, 68; Cha69; Ala71; Oic74; Nle75; | |
| [4-Cl—F]{FreeAcid} | 4-Cl—F77]Apelin-17(61-77) | |
| {Acetyl}[NPeg11][Orn]F[hArg][hArg]Q | Acetyl-NPeg11-[Orn61; hArg63, 64, | 1523 |
| [hArg]P[hArg][Cha]S[Abu]KG[Oic] | 66, 68; Cha69; Abu71; Oic74; Nle75; | |
| [Nle]P[4-Cl—F]{FreeAcid} | 4-Cl—F77]Apelin-17(61-77) | |
| {Acetyl}[NPeg11][Orn]F[hArg][hArg]Q | Acetyl-NPeg11-[Orn61; hArg63, 64, | 1524 |
| [hArg]P[hArg][Cha]S[Nle]KG[Oic] | 66, 68; Cha69; Nle71, 75; Oic74; 4- | |
| [Nle]P[4-Cl—F]{FreeAcid} | Cl—F77]Apelin-17(61-77) | |
| {Acetyl}[NPeg11][Orn]F[hArg][hArg]Q | Acetyl-NPeg11-[Orn61; hArg63, 64, | 1525 |
| [hArg]P[hArg][Cha]SVKG[Oic][Nle]P | 66, 68; Cha69; Val71; Oic74; Nle75; | |
| [4-Cl—F]{FreeAcid} | 4-Cl—F77]Apelin-17(61-77) | |
| {Acetyl}[NPeg11][Orn]F[hArg][hArg]Q | Acetyl-NPeg11-[Orn61; hArg63, 64, | 1526 |
| [hArg]P[hArg][Cha]SYKG[Oic][Nle]P | 66, 68; Cha69; Tyr71; Oic74; Nle75; | |
| [4-Cl—F]{FreeAcid} | 4-Cl—F77]Apelin-17(61-77) | |
| {Acetyl}[NPeg11][Orn]F[hArg][hArg]Q | Acetyl-NPeg11-[Orn61; hArg63, 64, | 1527 |
| [hArg]P[hArg][Cha]S[Cha]KG[Oic] | 66, 68; Cha69, 71; Oic74; Nle75; | |
| [Nle]P[4-Cl—F]{FreeAcid} | 4-Cl—F77]Apelin-17(61-77) | |
| {Acetyl}[NPeg11][Orn]F[hArg][hArg]Q | Acetyl-NPeg11-[Orn61; hArg63, 64, | 1528 |
| [hArg]P[hArg][Cha]SLKG[Oic][Nle]P | 66, 68; Cha69; Leu71; Oic74; Nle75; | |
| [4-Cl—F]{FreeAcid} | 4-Cl—F77]Apelin-17(61-77) | |
| {Acetyl}[NPeg11][Orn]F[hArg][hArg]Q | Acetyl-NPeg11-[Orn61; hArg63, 64, | 1529 |
| [hArg]P[hArg][Cha]SIKG[Oic][Nle]P | 66, 68; Cha69; Ile71; Oic74; Nle75; | |
| [4-Cl—F]{FreeAcid} | 4-Cl—F77]Apelin-17(61-77) | |
| {Acetyl}[NPeg11][Orn]F[hArg][hArg]Q | Acetyl-NPeg11-[Orn61; hArg63, 64, | 1530 |
| [hArg]P[hArg][Cha]SFKG[Oic][Nle]P | 66, 68; Cha69; Phe71; Oic74; Nle75; | |
| [4-Cl—F]{FreeAcid} | 4-Cl—F77]Apelin-17(61-77) | |
| {Acetyl}[NPeg11][Orn]F[hArg][hArg]Q | Acetyl-NPeg11-[Orn61; hArg63, 64, | 1531 |
| [hArg]P[hArg][Cha]S[2Pal]KG[Oic] | 66, 68; Cha69; 2Pal71; Oic74; | |
| [Nle]P[4-Cl—F]{FreeAcid} | Nle75; 4-Cl—F77]Apelin-17(61-77) | |
| {Acetyl}[NPeg11][Orn]F[hArg][hArg]Q | Acetyl-NPeg11-[Orn61; hArg63, 64, | 1532 |
| [hArg]P[hArg][Cha]S[1-Nal]KG[Oic] | 66, 68; Cha69; 1-Nal71; Oic74; | |
| [Nle]P[4-Cl—F]{FreeAcid} | Nle75; 4-Cl—F77]Apelin-17(61-77) | |
| {Acetyl}[NPeg11][Orn]F[hArg][hArg]Q | Acetyl-NPeg11-[Orn61; hArg63, 64, | 1533 |
| [hArg]P[hArg][Cha]S[3Pal]KG[Oic] | 66, 68; Cha69; 3Pal71; Oic74; | |
| [Nle]P[4-Cl—F]{FreeAcid} | Nle75; 4-Cl—F77]Apelin-17(61-77) | |
| {Acetyl}[NPeg11][Orn]F[hArg][hArg]Q | Acetyl-NPeg11-[Orn61; hArg63, 64, | 1534 |
| [hArg]P[hArg][Cha]S[Bip]KG[Oic] | 66, 68; Cha69; Bip71; Oic74; Nle75; | |
| [Nle]P[4-Cl—F]{FreeAcid} | 4-Cl—F77]Apelin-17(61-77) | |
| {Acetyl}[NPeg11]F[hArg][hArg]L[hArg] | Acetyl-[NPeg1161; hArg63, 64, 66, | 1535 |
| P[hArg][Cha]SAKG[Oic][Nle][1-Nal][4- | 68; Leu65; Cha69; Ala71; Oic74; | |
| Cl—F]{FreeAcid} | Nle75; 1-Nal76; 4-Cl—F77]Apelin- | |
| | 17(61-77) | |
| {Acetyl}[NPeg11]F[hArg][hArg]L[hArg] | Acetyl-[NPeg1161; hArg63, 64, 66, | 1536 |
| P[hArg][Cha]S[Cha]KG[Oic][Nle][1- | 68; Leu65; Cha69, 71; Oic74; Nle75; | |
| Nal][4-Cl—F]{FreeAcid} | 1-Nal76; 4-Cl—F77]Apelin- | |
| | 17(61-77) | |
| {Acetyl}[NPeg11]F[hArg][hArg]L[hArg] | Acetyl-[NPeg1161; hArg63, 64, 66, | 1537 |
| P[hArg][Cha][NMeSer]AKG[Oic][Nle] | 68; Leu65; Cha69; NMeSer70; | |
| [1-Nal][4-Cl—F]{FreeAcid} | Ala71; Oic74; Nle75; 1-Nal76; 4- | |
| | Cl—F77]Apelin-17(61-77) | |
| {Acetyl}[NPeg11]F[hArg][hArg]L[hArg] | Acetyl-[NPeg1161; hArg63, 64, 66, | 1538 |
| P[hArg][Cha][NMeSer][Cha]KG[Oic] | 68; Leu65; Cha69, 71; NMeSer70; | |
| [Nle][1-Nal][4-Cl—F]{FreeAcid} | Oic74; Nle75; 1-Nal76; 4-Cl—F77] | |
| | Apelin-17(61-77) | |
| {Acetyl}[NPeg11][Orn]F[hArg][hArg]L | Acetyl-NPeg11-[Orn61; hArg63, 64, | 1539 |
| [hArg]P[hArg][Cha]SAKG[Oic][Nle] | 66, 68; Leu65; Cha69; Ala71; Oic74; | |
| [1-Nal][4-Cl—F]{FreeAcid} | Nle75; 1-Nal76; 4-Cl—F77]Apelin- | |
| | 17(61-77) | |
| {Acetyl}[NPeg11][Orn]F[hArg][hArg]L | Acetyl-NPeg11-[Orn61; hArg63, 64, | 1540 |
| [hArg]P[hArg][Cha]S[Cha]KG[Oic] | 66, 68; Leu65; Cha69, 71; Oic74; | |
| [Nle][1-Nal][4-Cl—F]{FreeAcid} | Nle75; 1-Nal76; 4-Cl—F77]Apelin- | |
| | 17(61-77) | |
| {Acetyl}[NPeg11]F[hArg][hArg]L[hArg] | Acetyl-[NPeg1161; hArg63, 64, 66, | 1541 |
| P[hArg][Cha]S[2-Nal]KG[Oic][Nle][1- | 68; Leu65; Cha69; 2-Nal71; Oic74; | |
| Nal][4-F—F]{FreeAcid} | Nle75; 1-Nal76; 4-F—F77]Apelin- | |
| | 17(61-77) | |
| {Acetyl}[NPeg11][Orn]F[hArg][hArg]L | Acetyl-NPeg11-[Orn61; hArg63, 64, | 1542 |
| [hArg]P[hArg][Cha]S[2-Nal]KG[Oic] | 66, 68; Leu65; Cha69; 2-Nal71; | |
| [Nle][1-Nal][4-F—F]{FreeAcid} | Oic74; Nle75; 1-Nal76; 4-F—F77] | |
| | Apelin-17(61-77) | |
| {Acetyl}[NPeg11]F[hArg][hArg]Q | Acetyl-[NPeg1161; hArg63, 64, 66, | 1543 |
| [hArg]P[hArg][Cha]SHKG[Oic][Nle]P | 68; Cha69; Oic74; Nle75; D-Bip77] | |
| [D-Bip]{FreeAcid} | Apelin-17(61-77) | |
| {Acetyl}[NPeg11]F[hArg][hArg]L | Acetyl-[NPeg1161; hArg63, 64, 66, | 1544 |
| [hArg]P[hArg][Cha]S[2-Nal]KG[Oic] | 68; Leu65; Cha69; 2-Nal71; Oic74; | |
| [Nle]P[D-Bip]{FreeAcid} | Nle75; D-Bip77]Apelin-17(61-77) | |
| {Acetyl}[NPeg11]F[hArg][hArg]L | Acetyl-[NPeg1161; hArg63, 64, 66, | 1545 |
| [hArg]P[hArg][Cha]S[2-Nal]KG[Oic] | 68; Leu65; Cha69; 2-Nal71; Oic74; | |
| [Nle][1-Nal][D-Bip]{FreeAcid} | Nle75; 1-Nal76; D-Bip77]Apelin- | |
| | 17(61-77) | |
| {Acetyl}[NPeg11 ]F[hArg][hArg]L | Acetyl-[NPeg1161; hArg63, 64, 66, | 1546 |
| [hArg]P[hArg][Cha]T[2-Nal]KG[Oic] | 68; Leu65; Cha69; Thr70; 2-Nal71; | |
| [Nle][1-Nal][D-Bip]{FreeAcid} | Oic74; Nle75; 1-Nal76; D-Bip77] | |
| | Apelin-17(61-77) | |
| {Acetyl}[NPeg11]F[hArg][hArg]L[hArg] | Acetyl-[NPeg1161; hArg63, 64, 66, | 1547 |
| P[hArg][Cha]SAKG[Oic][Nle][1-Nal] | 68; Leu65; Cha69; Ala71; Oic74; | |
| [D-Bip]{FreeAcid} | Nle75; 1-Nal76; D-Bip77]Apelin- | |
| | 17(61-77) | |
| {Acetyl}[NPeg11][Orn]F[hArg][hArg]Q | Acetyl-NPeg11-[Orn61; hArg63, 64, | 1548 |
| [hArg]P[hArg][Cha]SHKG[Oic][Nle]P | 66, 68; Cha69; Oic74; Nle75; D- | |
| [D-Bip]{FreeAcid} | Bip77]Apelin-17(61-77) | |
| {Acetyl}[NPeg11][Orn]F[hArg][hArg]L | Acetyl-NPeg11-[Orn61; hArg63, 64, | 1549 |
| [hArg]P[hArg][Cha]S[2-Nal]KG[Oic] | 66, 68; Leu65; Cha69; 2-Nal71; | |
| [Nle]P[D-Bip]{FreeAcid} | Oic74; Nle75; D-Bip77]Apelin- | |
| | 17(61-77) | |
| {Acetyl}[NPeg11][Orn]F[hArg][hArg]L | Acetyl-NPeg11-[Orn61; hArg63, 64, | 1550 |
| [hArg]P[hArg][Cha]S[2-Nal]KG[Oic] | 66, 68; Leu65; Cha69; 2-Nal71; | |
| [Nle][1-Nal][D-Bip]{FreeAcid} | Oic74; Nle75; 1-Nal76; D-Bip77] | |
| | Apelin-17(61-77) | |
| {Acetyl}[NPeg11][Orn]F[hArg][hArg]L | Acetyl-NPeg11-[Orn61; hArg63, 64, | 1551 |
| [hArg]P[hArg][Cha]T[2-Nal]KG[Oic] | 66, 68; Leu65; Cha69; Thr70; 2- | |
| [Nle][1-Nal][D-Bip]{FreeAcid} | Nal71; Oic74; Nle75; 1-Nal76; D- | |
| | Bip77]Apelin-17(61-77) | |
| {Acetyl}[NPeg11][Orn]F[hArg][hArg]L | Acetyl-NPeg11-[Orn61; hArg63, 64, | 1552 |
| [hArg]P[hArg][Cha]SAKG[Oic][Nle] | 66, 68; Leu65; Cha69; Ala71; Oic74; | |
| [1-Nal][D-Bip]{FreeAcid} | Nle75; 1-Nal76; D-Bip77]Apelin- | |
| | 17(61-77) | |
| {Acetyl}[NPeg11]F[hArg][hArg]L | Acetyl-[NPeg1161; hArg63, 64, 66, | 1553 |
| [hArg]P[hArg][Cha]SAKG[Oic][Nle]P | 68; Leu65; Cha69; Ala71; Oic74; | |
| [D-Bip]{FreeAcid} | Nle75; D-Bip77]Apelin-17(61-77) | |
| {Acetyl}[NPeg11]F[hArg][hArg]L | Acetyl-[NPeg1161; hArg63, 64, 66, | 1554 |
| [hArg]P[hArg][Cha]S[Cha]KG[Oic] | 68; Leu65; Cha69, 71; Oic74; Nle75; | |
| [Nle]P[D-Bip]{FreeAcid} | D-Bip77]Apelin-17(61-77) | |
| {Acetyl}[NPeg11]F[hArg][hArg]L | Acetyl-[NPeg1161; hArg63, 64, 66, | 1555 |
| [hArg]P[hArg][Cha][NMeSer]AKG | 68; Leu65; Cha69; NMeSer70; | |
| [Oic][Nle]P[D-Bip]{FreeAcid} | Ala71; Oic74; Nle75; D-Bip77] | |
| | Apelin-17(61-77) | |
| {Acetyl}[NPeg11]F[hArg][hArg]L | Acetyl-[NPeg1161; hArg63, 64, 66, | 1556 |
| [hArg]P[hArg][Cha][NMeSer][Cha] | 68; Leu65; Cha69, 71; NMeSer70; | |
| KG[Oic][Nle]P[D-Bip]{FreeAcid} | Oic74; Nle75; D-Bip77]Apelin- | |
| | 17(61-77) | |
| {Acetyl}[NPeg11][Orn]F[hArg][hArg] | Acetyl-NPeg11-[Orn61; hArg63, 64, | 1557 |
| L[hArg]P[hArg][Cha]SAKG[Oic][Nle] | 66, 68; Leu65; Cha69; Ala71; Oic74; | |
| P[D-Bip]{FreeAcid} | Nle75; D-Bip77]Apelin-17(61-77) | |
| {Acetyl}[NPeg11][Orn]F[hArg][hArg] | Acetyl-NPeg11-[Orn61; hArg63, 64, | 1558 |
| L[hArg]P[hArg][Cha]S[Cha]KG[Oic] | 66, 68; Leu65; Cha69, 71; Oic74; | |
| [Nle]P[D-Bip]{FreeAcid} | Nle75; D-Bip77]Apelin-17(61-77) | |

[0485] Throughout this specification various publications, patents and patent applications have been referenced. The disclosures of these documents in their entireties are hereby incorporated by reference into this application. The reference to such documents, however, should not be construed as an acknowledgment that such documents are prior art to the application. Further, merely because a document may be incorporated by reference, this does not necessarily indicate that the applicants are in complete agreement with the document's contents.

1. An APJ peptide agonist having increased stability and/or potency relative to wild type Apelin-13 (SEQ ID NO: 2), wherein the agonist is modified with a half-life prolonging group at the N-terminus, C-terminus or elsewhere within the peptide agonist, and wherein the peptide agonist comprises at least one non-canonical amino acid.

2. The APJ peptide agonist of claim 1, wherein the half-life prolonging group is PEG, an Fc domain, IgG, HSA, PE, an Ab, a peptide, a lipid, poly(O-2-hydroxyethyl) starch (HES), or a nanostructure.

3. The APJ peptide agonist of claim 1, wherein the agonist is pyroglutamated at the N-terminus and is optionally PEGylated elsewhere in the agonist.

4. The APJ peptide agonist of claim 1, wherein the peptide agonist comprises at least 2 non-canonical amino acids.

5. The APJ peptide agonist of claim 4, wherein the peptide agonist comprises 3, 4 or 5 non-canonical amino acid residues.

6. The APJ peptide agonist of claim 1, wherein the peptide agonist has an increased in vitro or in vivo half-life.

7. The APJ peptide agonist of claim 1, wherein the peptide agonist binds to the APJ receptor.

8. The APJ peptide agonist of claim L wherein the half-life prolonging group comprises thiopropionyl(20K-mPEG), Atz(PEG10), NPeg11 or Atz(20K-mPEG).

9-22. (canceled)

23. The APJ peptide agonist of claim 1, wherein the peptide agonist comprises the amino acid sequence:
(SEQ ID NO: 121)
zX₁X₂X₃X₄X₅X₆X₇X₈X₉X₁₀X₁₁X₁₂X₁₃X₁₄X₁₅X₁₆X₁₇
wherein:
a) z is PEG or other moiety to extend circulating half-life,
b) X₁ is K, H, Y, F, [2Pal], [3Pal], [4Pal], [Orn], [Dpr], [Dab], no amino acid, or PEG or other moiety to extend circulating half-life,
c) X₂ is F, Y, W, no amino acid, or PEG or other moiety to extend circulating half-life,
d) X₃ is R, K, Q, H, Y, F, A, P, S, L, I, [2Pal], [3Pal], [4Pal], [Orn], [Dpr], [Dab], [hArg], [NMe-Arg], [Cit], no amino acid, or PEG or other moiety to extend circulating half-life,
e) X₄ is R, K, Q, H, Y, F, A, P, S, L, I, [2Pal], [3Pal], [4Pal], [Orn], [Dpr], [Dab], [hArg], [NMe-Arg], [Cit], no amino acid, or PEG or other moiety to extend circulating half-life,
f) X₅ is Q, L, V, I, F, Y, A, [PE], no amino acid, or PEG or other moiety to extend circulating half-life,
g) X₆ is R, K, [2Pal], [3Pal], [4Pal], [Orn], [Dpr], [Dab], [hArg], [NMe-Arg], or [Cit],
h) X₇ is P, G, [Oic], or other secondary amino acid,
i) X₈ is R, K, [2Pal], [3Pal], [4Pal], [Orn], [Dpr], [Dab], [hArg], [NMe-Arg], or [Cit],
j) X₉ is non-canonical amino acid [Cha] or [NMeLeu],
k) X₁₀ is S or PEG or other moiety to extend circulating half-life attached via a linker or the moiety may be attached with no linker,
l) X₁₁ is H or PEG or other moiety to extend circulating half-life attached via a linker or the moiety may be attached with no linker,
m) X₁₂ is K, another basic amino acid, aliphatic amino acid, or aromatic amino acid,
n) X₁₃ is G, A or P,
o) X₁₄ is P, [Oic], [hPro], [Tic], Tiq] or other secondary amino acid,
p) X₁₅ is M, L, V, I, [Nle][Cha] or other aliphatic amino acid,
q) X₁₆ is P, [Oic], [hPro], [Tic], Tiq], or any other aliphatic or aromatic amino acid, and
r) X₁₇ is F, [4-Cl—F], [4-F—F], [4-I—F], [1-Nal], [2-Nal], [Bip], [Dip], [Tic] in either in the L- or D-optical configuration, other aromatic amino acid either in the L- or D-optical configuration, or is absent.

24-29. (canceled)

30. The APJ peptide agonist of claim 1, wherein the peptide agonist comprises the sequence [hArg][Cha]SHKG[Oic][Nle]P[4-Cl—F] (SEQ ID NO: 65).

31. (canceled)

32. The APJ peptide agonist of claim 1, wherein the peptide agonist has a sequence selected from:
a.
(SEQ ID NO: 3)
[PE]RP[hArg][Cha][ [symbol] ]HKG[Oic][Nle]P[4-Cl-F],
b.
(SEQ ID NO: 4)
[PE]RP[hArg][NMeLeu][ [symbol] ]HKG[Oic][Nle]P[4-Cl-F],
c.
(SEQ ID NO: 5)
[PE]RP[hArg][Cha]S[ [symbol] ]KG[Oic][Nle]P[4-Cl-F],
d.
(SEQ ID NO: 6)
[PE]RP[hArg][NMeLeu]s[ [symbol] ]KG[Oic][Nle]P[4-Cl-F],
e.
(SEQ ID NO: 7) [symbol]
LRP[hArg][Cha][ [symbol] ]HKG[Oic][Nle]P[4-Cl-F],
f.
(SEQ ID NO: 8) [symbol]
LRP[hArg][NMeLeu][ [symbol] ]HKG[Oic][Nle]P[4-Cl-F],
g.
(SEQ ID NO: 9) [symbol]
LRP[hArg][Cha]S[ [symbol] ]KG[Oic][Nle]P[4-Cl-F],
h.
(SEQ ID NO: 10) [symbol]
LRP[hArg][NMeLeu]S[ [symbol] ]KG[Oic][Nle]P[4-Cl-F],
i.
(SEQ ID NO: 11) [symbol]
KFRRQRP[hArg][Cha]SHKG[Oic][Nle]P[4-Cl-F],
j.
(SEQ ID NO: 12) [symbol]
KFRRQRP[hArg][NMeLeu]SHKG[Oic][Nle]P[4-Cl-F],
k.
(SEQ ID NO: 13) [symbol]
FRRQRP[hArg][Cha]SHKG[Oic][Nle]P[4-Cl-F],
l.
(SEQ ID NO: 14) [symbol]
FRRQRP[hArg][NMeLeu]SHKG[Oic][Nle]P[4-Cl-F],
m.
(SEQ ID NO: 15) [symbol]
RRQRP[hArg][Cha]SHKG[Oic][Nle]P[4-Cl-F],
n.
(SEQ ID NO: 16) [symbol]
RRQRP[hArg][NMeLeu]SHKG[Oic][Nle]P[4-Cl-F],
o.
(SEQ ID NO: 17) [symbol]
RQRP[hArg][Cha]SHKG[Oic][Nle]P[4-Cl-F],
p.
(SEQ ID NO: 18) [symbol]
RQRP[hArg][NMeLeu]SHKG[Oic][Nle]P[4-Cl-F],
q.
(SEQ ID NO: 19) [symbol]
QRP[hArg][NMeLeu]SHKG[Oic][Nle]P[4-Cl-F],
r.
(SEQ ID NO: 20) [symbol]
QRP[hArg][Cha]SHKG[Oic][Nle]P[4-Cl-F],
s.
(SEQ ID NO: 21) [symbol]
LRP[hArg][Cha]SHKG[Oic][Nle]P[4-Cl-F],
or
t.
(SEQ ID NO: 22) [symbol]
LRP[hArg][NMeLeu]SHKG[Oic][Nle]P[4-Cl-F],
wherein PE is pyroglutamate and “ [symbol] ” or “⇑” may be any PEG or other half-life prolonging group.

33. The APJ peptide agonist of claim 32, wherein the PEG is thiopropionyl(20K-mPEG), Atz(PEG10), NPeg11 or Atz(20K-mPEG).

34. The APJ peptide agonist of claim 1, wherein the peptide agonist peptide agonist has a sequence selected from:
a. [PE]RP[hArg][Cha][Atz(PEG10)]HKG[Oic][Nle]P[4-Cl—F] (SEQ ID NO: 23),
b. Thiopropionyl(20K-mPEG)-KFRRQRP[hArg][Cha]SHKG[Oic][Nle]P[4-Cl—F] (SEQ ID NO: 24),
c. Atz(20K-mPEG)-KFRRQRP[hArg][Cha]SHKG[Oic][Nle]P[4-Cl—F] (SEQ ID NO: 25),
d. Thiopropionyl(20K-mPEG)-LRP[hArg][Cha]SHKG[Oic][Nle]P[4-Cl—F] (SEQ ID NO: 26),
e. Atz(20K-mPEG)-LRP[hArg][Cha]SHKG[Oic][Nle]P[4-Cl—F] (SEQ ID NO: 27), and or
f. NPeg11-KFRRQRP[hArg][Cha]SHKG[Oic][Nle]P[4-Cl—F] (SEQ ID NO: 28), wherein PE is pyroglutamate.

35. (canceled)

36. A composition of matter having the formula: [chemical structure]
wherein:
V¹ is a vehicle;
A¹, A², A³, and A⁴ are each independently selected from -(L¹)ₑ-P¹, -(L¹)ₑ-P¹-(L²)_{f}-P², -(L¹)ₑ-P¹-(L²)_{f}-P²-(L³)_{g}-P³, -(L¹)ₑ-P¹-(L²)_{f}-P²-(L³)_{g}-P³(L⁴)ₕ-P⁴, or higher multimers thereof;
P¹, P², P³, and P⁴ are each independently an APJ agonist polypeptide, wherein the agonist polypeptide comprises at least one non-canonical amino acid;
L¹, L², L³, and L⁴ are each independently linkers; and
a, b, c, d, e, f, g, and h are each independently 0 or 1, provided that at least one of a, b, and c is 1.

37. The composition of matter of claim 36, wherein the vehicle is PEG.

38. (canceled)

39. The composition of matter of claim 36, wherein the vehicle is an Fc domain.

40. The composition of matter of claim 36, wherein the vehicle is an antibody or portion thereof.

41. The composition of matter of claim 36, wherein the vehicle is a protein.

42-51. (canceled)

52. An isolated polypeptide having a sequence selected from SEQ ID NOs: 3-75, 128-137, 139-1379, 1413, 1414, 1426-1461, or 1463-1558.

53. (canceled)

54. The APJ peptide agonist of claim 1, wherein the peptide agonist is 13 or more amino acids in length.

55-62. (canceled)

63. The APJ peptide agonist of claim 1, wherein the half-life prolonging group comprises thiopropionyl(1K-mPEG), thiopropionyl(2K-mPEG), thiopropionyl(5K-mPEG), thiopropionyl(10K-mPEG), thiopropionyl(20K-mPEG), thiopropionyl(40K-mPEG), Atz(PEG10), NPeg11, Atz(1K-mPEG), Atz(2K-mPEG), Atz(5K-mPEG), Atz(10K-mPEG), or Atz(20K-mPEG).

64-99. (canceled)

100. A method of improving cardiac contractility in a patient in need thereof comprising administering to the patient the APJ peptide agonist of claim 1.

101. The method of claim 100, wherein dP/Dt max, or heart rate is increased in the patient following administration of the APJ peptide agonist.

102. A method of improving systolic or diastolic function in a patient in need thereof comprising administering to the patient the APJ peptide agonist of claim 1.

103. (canceled)

104. The method of claim 102, wherein the patient has heart failure.

105. A method of treating heart failure in a patient in need thereof comprising administering to the patient the APJ peptide agonist of claim 1.

106. The composition of matter of claim 36, wherein P¹, P², P³, and P⁴ are each independently an APJ agonist polypeptide comprising the sequence [hArg][Cha]SHKG[Oic][Nle]P[4-Cl—F] (SEQ ID NO: 65).

107. The composition of matter of claim 36, wherein P¹, P², P³, and P⁴ are each independently an APJ agonist polypeptide comprising an amino acid sequence selected from SEQ ID NOs: 130, 131, 133-136, 1413, 1414, 1426-1439, 1450-1453, 1559, or 1562.

108. The composition of matter of claim 39, wherein the Fc domain is a human Fc domain.

109. The composition of matter of claim 108, wherein the Fc domain comprises the amino acid sequence of SEQ ID NO: 1415 or SEQ ID NO: 1462.

110. A method of improving cardiac contractility in a patient in need thereof comprising administering to the patient the composition of matter of claim 36.

111. A method of improving systolic or diastolic function in a patient in need thereof comprising administering to the patient the composition of matter of claim 36.

112. The method of claim 111, wherein the patient has heart failure.

113. A method of treating heart failure in a patient in need thereof comprising administering to the patient the composition of matter of claim 36.

The application's sequence listing, which the Patent Office published only in electronic form, follows.

SEQUENCE LISTING (1562 sequences)

SEQ ID NO: 1 - protein, 36 aa, Homo sapiens
LVQPRGSRNGPGPWQGGRRKFRRQRPRLSHKGPMPF

SEQ ID NO: 2 - protein, 13 aa, Homo sapiens
QRPRLSHKGPMPF

SEQ ID NO: 3 - protein, 13 aa, Artificial Sequence
  source: /note="Description of Artificial Sequence: Synthetic peptide"
  MOD_RES (1)..(1): PyroGlu
  MOD_RES (4)..(4): hArg
  MOD_RES (5)..(5): Cha
  MOD_RES (6)..(6): Any amino acid
  misc_feature (6)..(6): /note="May or may not be modified by PEG or other half-life prolonging derivative"
  MOD_RES (10)..(10): Oic
  MOD_RES (11)..(11): Nle
  MOD_RES (13)..(13): 4-Cl-F
ERPRAXHKGXLPF

SEQ ID NO: 4 - protein, 13 aa, Artificial Sequence
  source: /note="Description of Artificial Sequence: Synthetic peptide"
  MOD_RES (1)..(1): PyroGlu
  MOD_RES (4)..(4): hArg
  MOD_RES (5)..(5): NMeLeu
  MOD_RES (6)..(6): Any amino acid
  misc_feature (6)..(6): /note="May or may not be modified by PEG or other half-life prolonging derivative"
  MOD_RES (10)..(10): Oic
  MOD_RES (11)..(11): Nle
  MOD_RES (13)..(13): 4-Cl-F
ERPRLXHKGXLPF

SEQ ID NO: 5 - protein, 13 aa, Artificial Sequence
  source: /note="Description of Artificial Sequence: Synthetic peptide"
  MOD_RES (1)..(1): PyroGlu
  MOD_RES (4)..(4): hArg
  MOD_RES (5)..(5): Cha
  MOD_RES (7)..(7): Any amino acid
  misc_feature (7)..(7): /note="May or may not be modified by PEG or other half-life prolonging derivative"
  MOD_RES (10)..(10): Oic
  MOD_RES (11)..(11): Nle
  MOD_RES (13)..(13): 4-Cl-F
ERPRASXKGXLPF

SEQ ID NO: 6 - protein, 13 aa, Artificial Sequence
  source: /note="Description of Artificial Sequence: Synthetic peptide"
  MOD_RES (1)..(1): PyroGlu
  MOD_RES (4)..(4): hArg
  MOD_RES (5)..(5): NMeLeu
  MOD_RES (7)..(7): Any amino acid
  misc_feature (7)..(7): /note="May or may not be modified by PEG or other half-life prolonging derivative"
  MOD_RES (10)..(10): Oic
  MOD_RES (11)..(11): Nle
  MOD_RES (13)..(13): 4-Cl-F
ERPRLSXKGXLPF

SEQ ID NO: 7 - protein, 14 aa, Artificial Sequence
  source: /note="Description of Artificial Sequence: Synthetic peptide"
  MOD_RES (1)..(1): Any amino acid or absent
  misc_feature (1)..(1): /note="May or may not be modified by PEG or other half-life prolonging derivative"
  MOD_RES (5)..(5): hArg
  MOD_RES (6)..(6): Cha
  MOD_RES (7)..(7): Any amino acid
  misc_feature (7)..(7): /note="May or may not be modified by PEG or other half-life prolonging derivative"
  MOD_RES (11)..(11): Oic
  MOD_RES (12)..(12): Nle
  MOD_RES (14)..(14): 4-Cl-F
XLRPRAXHKGXLPF

SEQ ID NO: 8 - protein, 14 aa, Artificial Sequence
  source: /note="Description of Artificial Sequence: Synthetic peptide"
  MOD_RES (1)..(1): Any amino acid or absent
  misc_feature (1)..(1): /note="May or may not be modified by PEG or other half-life prolonging derivative"
  MOD_RES (5)..(5): hArg
  MOD_RES (6)..(6): NMeLeu
  MOD_RES (7)..(7): Any amino acid
  misc_feature (7)..(7): /note="May or may not be modified by PEG or other half-life prolonging derivative"
  MOD_RES (11)..(11): Oic
  MOD_RES (12)..(12): Nle
  MOD_RES (14)..(14): 4-Cl-F
XLRPRLXHKGXLPF

SEQ ID NO: 9 - protein, 14 aa, Artificial Sequence
  source: /note="Description of Artificial Sequence: Synthetic peptide"
  MOD_RES (1)..(1): Any amino acid or absent
  misc_feature (1)..(1): /note="May or may not be modified by PEG or other half-life prolonging derivative"
  MOD_RES (5)..(5): hArg
  MOD_RES (6)..(6): Cha
  MOD_RES (8)..(8): Any amino acid
  misc_feature (8)..(8): /note="May or may not be modified by PEG or other half-life prolonging derivative"
  MOD_RES (11)..(11): Oic
  MOD_RES (12)..(12): Nle
  MOD_RES (14)..(14): 4-Cl-F
XLRPRASXKGXLPF

SEQ ID NO: 10 - protein, 14 aa, Artificial Sequence
  source: /note="Description of Artificial Sequence: Synthetic peptide"
  MOD_RES (1)..(1): Any amino acid or absent
  misc_feature (1)..(1): /note="May or may not be modified by PEG or other half-life prolonging derivative"
  MOD_RES (5)..(5): hArg
  MOD_RES (6)..(6): NMeLeu
  MOD_RES (8)..(8): Any amino acid
  misc_feature (8)..(8): /note="May or may not be modified by PEG or other half-life prolonging derivative"
  MOD_RES (11)..(11): Oic
  MOD_RES (12)..(12): Nle
  MOD_RES (14)..(14): 4-Cl-F
XLRPRLSXKGXLPF

SEQ ID NO: 11 - protein, 18 aa, Artificial Sequence
  source: /note="Description of Artificial Sequence: Synthetic peptide"
  MOD_RES (1)..(1): Any amino acid or absent
  misc_feature (1)..(1): /note="May or may not be modified by PEG or other half-life prolonging derivative"
  MOD_RES (9)..(9): hArg
  MOD_RES (10)..(10): Cha
  MOD_RES (15)..(15): Oic
  MOD_RES (16)..(16): Nle
  MOD_RES (18)..(18): 4-Cl-F
XKFRRQRPRASHKGXLPF

SEQ ID NO: 12 - protein, 18 aa, Artificial Sequence
  source: /note="Description of Artificial Sequence: Synthetic peptide"
  MOD_RES (1)..(1): Any amino acid or absent
  misc_feature (1)..(1): /note="May or may not be modified by PEG or other half-life prolonging derivative"
  MOD_RES (9)..(9): hArg
  MOD_RES (10)..(10): NMeLeu
  MOD_RES (15)..(15): Oic
  MOD_RES (16)..(16): Nle
  MOD_RES (18)..(18): 4-Cl-F
XKFRRQRPRLSHKGXLPF

SEQ ID NO: 13 - protein, 17 aa, Artificial Sequence
  source: /note="Description of Artificial Sequence: Synthetic peptide"
  MOD_RES (1)..(1): Any amino acid or absent
  misc_feature (1)..(1): /note="May or may not be modified by PEG or other half-life prolonging derivative"
  MOD_RES (8)..(8): hArg
  MOD_RES (9)..(9): Cha
  MOD_RES (14)..(14): Oic
  MOD_RES (15)..(15): Nle
  MOD_RES (17)..(17): 4-Cl-F
XFRRQRPRASHKGXLPF

SEQ ID NO: 14 - protein, 17 aa, Artificial Sequence
  source: /note="Description of Artificial Sequence: Synthetic peptide"
  MOD_RES (1)..(1): Any amino acid or absent
  misc_feature (1)..(1): /note="May or may not be modified by PEG or other half-life prolonging derivative"
  MOD_RES (8)..(8): hArg
  MOD_RES (9)..(9): NMeLeu
  MOD_RES (14)..(14): Oic
  MOD_RES (15)..(15): Nle
  MOD_RES (17)..(17): 4-Cl-F
XFRRQRPRLSHKGXLPF

SEQ ID NO: 15 - protein, 16 aa, Artificial Sequence
  source: /note="Description of Artificial Sequence: Synthetic peptide"
  MOD_RES (1)..(1): Any amino acid or absent
  misc_feature (1)..(1): /note="May or may not be modified by PEG or other half-life prolonging derivative"
  MOD_RES (7)..(7): hArg
  MOD_RES (8)..(8): Cha
  MOD_RES (13)..(13): Oic
  MOD_RES (14)..(14): Nle
  MOD_RES (16)..(16): 4-Cl-F
XRRQRPRASHKGXLPF

SEQ ID NO: 16 - protein, 16 aa, Artificial Sequence
  source: /note="Description of Artificial Sequence: Synthetic peptide"
  MOD_RES (1)..(1): Any amino acid or absent
  misc_feature (1)..(1): /note="May or may not be modified by PEG or other half-life prolonging derivative"
  MOD_RES (7)..(7): hArg
  MOD_RES (8)..(8): NMeLeu
  MOD_RES (13)..(13): Oic
  MOD_RES (14)..(14): Nle
  MOD_RES (16)..(16): 4-Cl-F
XRRQRPRLSHKGXLPF

SEQ ID NO: 17 - protein, 15 aa, Artificial Sequence
  source: /note="Description of Artificial Sequence: Synthetic peptide"
  MOD_RES (1)..(1): Any amino acid or absent
  misc_feature (1)..(1): /note="May or may not be modified by PEG or other half-life prolonging derivative"
  MOD_RES (6)..(6): hArg
  MOD_RES (7)..(7): Cha
  MOD_RES (12)..(12): Oic
  MOD_RES (13)..(13): Nle
  MOD_RES (15)..(15): 4-Cl-F
XRQRPRASHKGXLPF

SEQ ID NO: 18 - protein, 15 aa, Artificial Sequence
  source: /note="Description of Artificial Sequence: Synthetic peptide"
  MOD_RES (1)..(1): Any amino acid or absent
  misc_feature (1)..(1): /note="May or may not be modified by PEG or other half-life prolonging derivative"
  MOD_RES (6)..(6): hArg
  MOD_RES (7)..(7): NMeLeu
  MOD_RES (12)..(12): Oic
  MOD_RES (13)..(13): Nle
  MOD_RES (15)..(15): 4-Cl-F
XRQRPRLSHKGXLPF

SEQ ID NO: 19 - protein, 14 aa, Artificial Sequence
  source: /note="Description of Artificial Sequence: Synthetic peptide"
  MOD_RES (1)..(1): Any amino acid or absent
  misc_feature (1)..(1): /note="May or may not be modified by PEG or other half-life prolonging derivative"
  MOD_RES (5)..(5): hArg
  MOD_RES (6)..(6): NMeLeu
  MOD_RES (11)..(11): Oic
  MOD_RES (12)..(12): Nle
  MOD_RES (14)..(14): 4-Cl-F
XQRPRLSHKGXLPF

SEQ ID NO: 20 - protein, 14 aa, Artificial Sequence
  source: /note="Description of Artificial Sequence: Synthetic peptide"
  MOD_RES (1)..(1): Any amino acid or absent
  misc_feature (1)..(1): /note="May or may not be modified by PEG or other half-life prolonging derivative"
  MOD_RES (5)..(5): hArg
  MOD_RES (6)..(6): Cha
  MOD_RES (11)..(11): Oic
  MOD_RES (12)..(12): Nle
  MOD_RES (14)..(14): 4-Cl-F
XQRPRASHKGXLPF

SEQ ID NO: 21 - protein, 14 aa, Artificial Sequence
  source: /note="Description of Artificial Sequence: Synthetic peptide"
  MOD_RES (1)..(1): Any amino acid or absent
  misc_feature (1)..(1): /note="May or may not be modified by PEG or other half-life prolonging derivative"
  MOD_RES (5)..(5): hArg
  MOD_RES (6)..(6): Cha
  MOD_RES (11)..(11): Oic
  MOD_RES (12)..(12): Nle
  MOD_RES (14)..(14): 4-Cl-F
XLRPRASHKGXLPF

SEQ ID NO: 22 - protein, 14 aa, Artificial Sequence
  source: /note="Description of Artificial Sequence: Synthetic peptide"
  MOD_RES (1)..(1): Any amino acid or absent
  misc_feature (1)..(1): /note="May or may not be modified by PEG or other half-life prolonging derivative"
  MOD_RES (5)..(5): hArg
  MOD_RES (6)..(6): NMeLeu
  MOD_RES (11)..(11): Oic
  MOD_RES (12)..(12): Nle
  MOD_RES (14)..(14): 4-Cl-F
XLRPRLSHKGXLPF

SEQ ID NO: 23 - protein, 13 aa, Artificial Sequence
  source: /note="Description of Artificial Sequence: Synthetic peptide"
  MOD_RES (1)..(1): PyroGlu
  MOD_RES (4)..(4): hArg
  MOD_RES (5)..(5): Cha
  MOD_RES (6)..(6): Atz(PEG10)
  MOD_RES (10)..(10): Oic
  MOD_RES (11)..(11): Nle
  MOD_RES (13)..(13): 4-Cl-F
ERPRAAHKGXLPF

SEQ ID NO: 24 - protein, 17 aa, Artificial Sequence
  source: /note="Description of Artificial Sequence: Synthetic peptide"
  source: /note="N-term Thiopropionyl(20K-mPEG)"
  MOD_RES (8)..(8): hArg
  MOD_RES (9)..(9): Cha
  MOD_RES (14)..(14): Oic
  MOD_RES (15)..(15): Nle
  MOD_RES (17)..(17): 4-Cl-F
KFRRQRPRASHKGXLPF

SEQ ID NO: 25 - protein, 18 aa, Artificial Sequence
  source: /note="Description of Artificial Sequence: Synthetic peptide"
  MOD_RES (1)..(1): Atz(20K-mPEG)
  MOD_RES (9)..(9): hArg
  MOD_RES (10)..(10): Cha
  MOD_RES (15)..(15): Oic
  MOD_RES (16)..(16): Nle
  MOD_RES (18)..(18): 4-Cl-F
AKFRRQRPRASHKGXLPF

SEQ ID NO: 26 - protein, 13 aa, Artificial Sequence
  source: /note="Description of Artificial Sequence: Synthetic peptide"
  source: /note="N-term Thiopropionyl(20K-mPEG)"
  MOD_RES (4)..(4): hArg
  MOD_RES (5)..(5): Cha
  MOD_RES (10)..(10): Oic
  MOD_RES (11)..(11): Nle
  MOD_RES (13)..(13): 4-Cl-F
LRPRASHKGXLPF

SEQ ID NO: 27 - protein, 14 aa, Artificial Sequence
  source: /note="Description of Artificial Sequence: Synthetic peptide"
  MOD_RES (1)..(1): Atz(20K-mPEG)
  MOD_RES (5)..(5): hArg
  MOD_RES (6)..(6): Cha
  MOD_RES (11)..(11): Oic
  MOD_RES (12)..(12): Nle
  MOD_RES (14)..(14): 4-Cl-F
ALRPRASHKGXLPF

SEQ ID NO: 28 - protein, 17 aa, Artificial Sequence
  source: /note="Description of Artificial Sequence: Synthetic peptide"
  source: /note="N-term NPEG11"
  MOD_RES (8)..(8): hArg
  MOD_RES (9)..(9): Cha
  MOD_RES (14)..(14): Oic
  MOD_RES (15)..(15): Nle
  MOD_RES (17)..(17): 4-Cl-F
KFRRQRPRASHKGXLPF

SEQ ID NO: 29 - protein, 12 aa, Artificial Sequence
  source: /note="Description of Artificial Sequence: Synthetic peptide"
  MOD_RES (1)..(1): PyroGlu
  MOD_RES (4)..(4): hArg
  MOD_RES (5)..(5): NMeLeu
  MOD_RES (7)..(7): Pra(NPEG9)
  MOD_RES (11)..(11): Nle
  MOD_RES (12)..(12): D-Phe
ERPRLFGKGPLF

SEQ ID NO: 30 - protein, 14 aa, Artificial Sequence
  source: /note="Description of Artificial Sequence: Synthetic peptide"
  source: /note="N-term Acetyl"
  MOD_RES (1)..(1): Pra(NPEG9)
  MOD_RES (5)..(5): hArg
  MOD_RES (6)..(6): NMeLeu
  MOD_RES (7)..(7): Pra(NPEG9)
  MOD_RES (12)..(12): Nle
  MOD_RES (14)..(14): 4-Cl-F
GLRPRLGHKGPLPF

SEQ ID NO: 31 - protein, 12 aa, Artificial Sequence
  source: /note="Description of Artificial Sequence: Synthetic peptide"
  MOD_RES (1)..(1): PyroGlu
  MOD_RES (4)..(4): hArg
  MOD_RES (5)..(5): Cha
  MOD_RES (11)..(11): Nle
  MOD_RES (12)..(12): 1-Nal
ERPRASHKGPLA

SEQ ID NO: 32 - protein, 12 aa, Artificial Sequence
  source: /note="Description of Artificial Sequence: Synthetic peptide"
  MOD_RES (1)..(1): PyroGlu
  MOD_RES (4)..(4): hArg
  MOD_RES (5)..(5): Cha
  MOD_RES (11)..(11): Nle
  MOD_RES (12)..(12): 4-Cl-F
ERPRASHKGPLF

SEQ ID NO: 33 - protein, 12 aa, Artificial Sequence
  source: /note="Description of Artificial Sequence: Synthetic peptide"
  MOD_RES (1)..(1): PyroGlu
  MOD_RES (4)..(4): hArg
  MOD_RES (5)..(5): Cha
  MOD_RES (7)..(7): Pra(NPEG9)
  MOD_RES (10)..(10): Oic
  MOD_RES (11)..(11): Nle
  MOD_RES (12)..(12): D-Phe
ERPRAFGKGXLF

SEQ ID NO: 34 - protein, 13 aa, Artificial Sequence
  source: /note="Description of Artificial Sequence: Synthetic peptide"
  MOD_RES (1)..(1): PyroGlu
  MOD_RES (4)..(4): hArg
  MOD_RES (5)..(5): Cha
  MOD_RES (6)..(6): Pra(NPEG9)
  MOD_RES (10)..(10): Oic
  MOD_RES (11)..(11): Nle
  MOD_RES (13)..(13): 4-Cl-F
ERPRAGHKGXLPF

SEQ ID NO: 35 - protein, 12 aa, Artificial Sequence
  source: /note="Description of Artificial Sequence: Synthetic peptide"
  MOD_RES (1)..(1): PyroGlu
  MOD_RES (4)..(4): hArg
  MOD_RES (5)..(5): NMeLeu
  MOD_RES (6)..(6): Pra(NPEG9)
  MOD_RES (10)..(10): Oic
  MOD_RES (11)..(11): Nle
  MOD_RES (12)..(12): 4-Cl-F
ERPRLGHKGXLF

SEQ ID NO: 36 - protein, 13 aa, Artificial Sequence
  source: /note="Description of Artificial Sequence: Synthetic peptide"
  MOD_RES (1)..(1): PyroGlu
  MOD_RES (4)..(4): hArg
  MOD_RES (5)..(5): NMeLeu
  MOD_RES (6)..(6): Pra(NPEG9)
  MOD_RES (10)..(10): Oic
  MOD_RES (11)..(11): Nle
  MOD_RES (13)..(13): 4-Cl-F
ERPRLGHKGXLPF

SEQ ID NO: 37 - protein, 13 aa, Artificial Sequence
  source: /note="Description of Artificial Sequence: Synthetic peptide"
  source: /note="N-term Acetyl"
  MOD_RES (1)..(1): Pra(NPEG9)
  MOD_RES (5)..(5): hArg
  MOD_RES (6)..(6): Cha
  MOD_RES (12)..(12): Nle
  MOD_RES (13)..(13): D-1Nal
GLRPRASHKGPLA

SEQ ID NO: 38 - protein, 18 aa, Artificial Sequence
  source: /note="Description of Artificial Sequence: Synthetic peptide"
  MOD_RES (1)..(1): Atz(PEG10)
  MOD_RES (2)..(2): Orn
  MOD_RES (9)..(9): hArg
  MOD_RES (10)..(10): Cha
  MOD_RES (15)..(15): Oic
  MOD_RES (16)..(16): Nle
  MOD_RES (18)..(18): 4-Cl-F
AXFRRQRPRASHKGXLPF

SEQ ID NO: 39 - protein, 18 aa, Artificial Sequence
  source: /note="Description of Artificial Sequence: Synthetic peptide"
  MOD_RES (1)..(1): Atz(PEG10)
  MOD_RES (2)..(2): Orn
  MOD_RES (4)..(5): hArg
  MOD_RES (7)..(7): hArg
  MOD_RES (9)..(9): hArg
  MOD_RES (10)..(10): Cha
  MOD_RES (15)..(15): Oic
  MOD_RES (16)..(16): Nle
  MOD_RES (18)..(18): 4-Cl-F
AXFRRQRPRASHKGXLPF

SEQ ID NO: 40 - protein, 18 aa, Artificial Sequence
  source: /note="Description of Artificial Sequence: Synthetic peptide"
  MOD_RES (1)..(1): Atz(PEG10)
  MOD_RES (4)..(5): Cit
  MOD_RES (7)..(7): hArg
  MOD_RES (9)..(9): hArg
  MOD_RES (10)..(10): Cha
  MOD_RES (15)..(15): Oic
  MOD_RES (16)..(16): Nle
  MOD_RES (18)..(18): 4-Cl-F
AKFXXQRPRASHKGXLPF

SEQ ID NO: 41 - protein, 18 aa, Artificial Sequence
  source: /note="Description of Artificial Sequence: Synthetic peptide"
  MOD_RES (1)..(1): Atz(PEG10)
  MOD_RES (4)..(5): Cit
  MOD_RES (7)..(7): Cit
  MOD_RES (9)..(9): hArg
  MOD_RES (10)..(10): Cha
  MOD_RES (15)..(15): Oic
  MOD_RES (16)..(16): Nle
  MOD_RES (18)..(18): 4-Cl-F
AKFXXQXPRASHKGXLPF

SEQ ID NO: 42 - protein, 14 aa, Artificial Sequence
  source: /note="Description of Artificial Sequence: Synthetic peptide"
  MOD_RES (1)..(1): Atz(PEG10)
  MOD_RES (5)..(5): hArg
  MOD_RES (6)..(6): Cha
  MOD_RES (11)..(11): Oic
  MOD_RES (12)..(12): Nle
  MOD_RES (14)..(14): 4-Cl-F
ALRPRASHKGXLPF

SEQ ID NO: 43 - protein, 13 aa, Artificial Sequence
  source: /note="Description of Artificial Sequence: Synthetic peptide"
  MOD_RES (1)..(1): PyroGlu
  MOD_RES (4)..(4): hArg
  MOD_RES (5)..(5): Cha
  MOD_RES (6)..(6): Atz(PEG10)
  MOD_RES (10)..(10): Oic
  MOD_RES (11)..(11): Nle
  MOD_RES (13)..(13): 4-Cl-F
ERPRAAHKGXLPF

SEQ ID NO: 44 - protein, 17 aa, Artificial Sequence
  source: /note="Description of Artificial Sequence: Synthetic peptide"
  source: /note="N-term Thiopropionyl(20K-mPEG)"
  MOD_RES (8)..(8): hArg
  MOD_RES (9)..(9): Cha
  MOD_RES (14)..(14): Oic
  MOD_RES (15)..(15): Nle
  MOD_RES (17)..(17): 4-Cl-F
KFRRQRPRASHKGXLPF

SEQ ID NO: 45 - protein, 16 aa, Artificial Sequence
  source: /note="Description of Artificial Sequence: Synthetic peptide"
  source: /note="N-term Thiopropionyl(20K-mPEG)"
  MOD_RES (7)..(7): hArg
  MOD_RES (8)..(8): Cha
  MOD_RES (13)..(13): Oic
  MOD_RES (14)..(14): Nle
  MOD_RES (16)..(16): 4-Cl-F
FRRQRPRASHKGXLPF

SEQ ID NO: 46 - protein, 15 aa, Artificial Sequence
  source: /note="Description of Artificial Sequence: Synthetic peptide"
  source: /note="N-term Thiopropionyl(20K-mPEG)"
  MOD_RES (6)..(6): hArg
  MOD_RES (7)..(7): Cha
  MOD_RES (12)..(12): Oic
  MOD_RES (13)..(13): Nle
  MOD_RES (15)..(15): 4-Cl-F
RRQRPRASHKGXLPF

SEQ ID NO: 47 - protein, 14 aa, Artificial Sequence
  source: /note="Description of Artificial Sequence: Synthetic peptide"
  source: /note="N-term Thiopropionyl(20K-mPEG)"
  MOD_RES (5)..(5): hArg
  MOD_RES (6)..(6): Cha
  MOD_RES (11)..(11): Oic
  MOD_RES (12)..(12): Nle
  MOD_RES (14)..(14): 4-Cl-F
RQRPRASHKGXLPF

SEQ ID NO: 48 - protein, 13 aa, Artificial Sequence
  source: /note="Description of Artificial Sequence: Synthetic peptide"
  source: /note="N-term Thiopropionyl(20K-mPEG)"
  MOD_RES (4)..(4): hArg
  MOD_RES (5)..(5): Cha
  MOD_RES (10)..(10): Oic
  MOD_RES (11)..(11): Nle
  MOD_RES (13)..(13): 4-Cl-F
QRPRASHKGXLPF

SEQ ID NO: 49 - protein, 18 aa, Artificial Sequence
  source: /note="Description of Artificial Sequence: Synthetic peptide"
  MOD_RES (1)..(1): Atz(20K-mPEG)
  MOD_RES (9)..(9): hArg
  MOD_RES (10)..(10): Cha
  MOD_RES (15)..(15): Oic
  MOD_RES (16)..(16): Nle
  MOD_RES (18)..(18): 4-Cl-F
AKFRRQRPRASHKGXLPF

SEQ ID NO: 50 - protein, 14 aa, Artificial Sequence
  source: /note="Description of Artificial Sequence: Synthetic peptide"
  MOD_RES (1)..(1): Atz(20K-mPEG)
  MOD_RES (5)..(5): hArg
  MOD_RES (6)..(6): Cha
  MOD_RES (11)..(11): Oic
  MOD_RES (12)..(12): Nle
  MOD_RES (14)..(14): 4-Cl-F
ALRPRASHKGXLPF

SEQ ID NO: 51 - protein, 13 aa, Artificial Sequence
  source: /note="Description of Artificial Sequence: Synthetic peptide"
  MOD_RES (1)..(1): PyroGlu
  MOD_RES (5)..(5): NMeLeu
  MOD_RES (11)..(11): Nle
ERPRLFHKGPLPF

SEQ ID NO: 52 - protein, 12 aa, Artificial Sequence
  source: /note="Description of Artificial Sequence: Synthetic peptide"
  MOD_RES (1)..(1): PyroGlu
  MOD_RES (4)..(4): hArg
  MOD_RES (5)..(5): Cha
  MOD_RES (11)..(11): Nle
  MOD_RES (12)..(12): D-1Nal
ERPRASHKGPLA

SEQ ID NO: 53 - protein, 13 aa, Artificial Sequence
  source: /note="Description of Artificial Sequence: Synthetic peptide"
  MOD_RES (1)..(1): PyroGlu
  MOD_RES (4)..(4): hArg
  MOD_RES (5)..(5): NMeLeu
  MOD_RES (6)..(6): Pra
  MOD_RES (8)..(8): 1-Nal
  MOD_RES (10)..(10): Oic
  MOD_RES (11)..(11): Nle
  MOD_RES (13)..(13): 4-Cl-F
ERPRLGHAPXLPF

SEQ ID NO: 54 - protein, 13 aa, Artificial Sequence
  source: /note="Description of Artificial Sequence: Synthetic peptide"
  MOD_RES (1)..(1): PyroGlu
  MOD_RES (4)..(4): hArg
  MOD_RES (5)..(5): NMeLeu
  MOD_RES (6)..(6): Pra
  MOD_RES (8)..(8): 4AmP
  MOD_RES (10)..(10): Oic
  MOD_RES (11)..(11): Nle
  MOD_RES (13)..(13): 4-Cl-F
ERPRLGHFPXLPF

SEQ ID NO: 55 - protein, 16 aa, Artificial Sequence
  source: /note="Description of Artificial Sequence: Synthetic peptide"
  MOD_RES (3)..(4): Cit
  MOD_RES (6)..(6): hArg
  MOD_RES (8)..(8): hArg
  MOD_RES (9)..(9): Cha
  MOD_RES (14)..(14): Oic
  MOD_RES (15)..(15): Nle
  source: /note="C-term Amide"
KFXXLRPRASHKGXLP

SEQ ID NO: 56 - protein, 16 aa, Artificial Sequence
  source: /note="Description of Artificial Sequence: Synthetic peptide"
  MOD_RES (6)..(6): hArg
  MOD_RES (8)..(8): hArg
  MOD_RES (9)..(9): Cha
  MOD_RES (14)..(14): Oic
  MOD_RES (15)..(15): Nle
  source: /note="C-term Amide"
KFRRLRPRASHKGXLP

SEQ ID NO: 57 - protein, 13 aa, Artificial Sequence
  source: /note="Description of Artificial Sequence: Synthetic peptide"
  MOD_RES (1)..(1): PyroGlu
  MOD_RES (6)..(6): Pra(NPEG9)
ERPRLGHKGPMPF

SEQ ID NO: 58 - protein, 12 aa, Artificial Sequence
  source: /note="Description of Artificial Sequence: Synthetic peptide"
  MOD_RES (1)..(1): PyroGlu
  MOD_RES (4)..(4): hArg
  MOD_RES (5)..(5): NMeLeu
  MOD_RES (6)..(6): Pra(NPEG9)
  MOD_RES (11)..(11): Nle
  MOD_RES (12)..(12): 4-Cl-F
ERPRLGHKGPLF

SEQ ID NO: 59 - protein, 12 aa, Artificial Sequence
  source: /note="Description of Artificial Sequence: Synthetic peptide"
  MOD_RES (1)..(1): PyroGlu
  MOD_RES (4)..(4): hArg
  MOD_RES (5)..(5): Cha
  MOD_RES (6)..(6): Pra(NPEG9)
  MOD_RES (11)..(11): Nle
  MOD_RES (12)..(12): 4-Cl-F
ERPRAGHKGPLF

SEQ ID NO: 60 - protein, 12 aa, Artificial Sequence
  source: /note="Description of Artificial Sequence: Synthetic peptide"
  MOD_RES (1)..(1): PyroGlu
  MOD_RES (4)..(4): hArg
  MOD_RES (5)..(5): NMeLeu
  MOD_RES (6)..(6): Pra(NPEG9)
  MOD_RES (10)..(10): Oic
  MOD_RES (11)..(11): Nle
  MOD_RES (12)..(12): 4-Cl-F
ERPRLGHKGXLF

SEQ ID NO: 61 - protein, 17 aa, Artificial Sequence
  source: /note="Description of Artificial Sequence: Synthetic peptide"
  MOD_RES (1)..(4): Any amino acid or absent
  MOD_RES (5)..(5): Nonfunctional, hydrophobic or polar amino acid or absent
  MOD_RES (6)..(6): Polar or basic amino acid or absent
  MOD_RES (7)..(7): Nonfunctional or hydrophobic amino acid
  MOD_RES (8)..(8): Basic or polar amino acid
  MOD_RES (9)..(9): Nonfunctional or hydrophobic amino acid
  MOD_RES (10)..(10): Nonfunctional, polar or hydrophobic amino acid
  MOD_RES (11)..(11): Nonfunctional, polar, basic or hydrophobic amino acid
  MOD_RES (12)..(12): Nonfunctional, hydrophobic, polar or basic amino acid
  MOD_RES (13)..(13): Nonfunctional or aromatic amino acid
  MOD_RES (14)..(14): Nonfunctional or hydrophilic amino acid
  MOD_RES (15)..(15): Nonfunctional, polar or hydrophobic amino acid
  MOD_RES (16)..(16): Nonfunctional or hydrophobic amino acid
  MOD_RES (17)..(17): Hydrophobic amino acid or absent
  source: /note="see specification as filed for detailed description of substitutions and preferred embodiments"
XXXXXXXXXXXXXXXXX

SEQ ID NO: 62 - protein, 8 aa, Artificial Sequence
  source: /note="Description of Artificial Sequence: Synthetic peptide"
  misc_feature (1)..(8): /note="This sequence may encompass 2-4 'Gly-Ala' repeating units"
  VARIANT (5)..(6): /replace=" "
  VARIANT (7)..(8): /replace=" "
  misc_feature (5)..(8): /note="Residues given in the sequence have no preference with respect to those in the annotations for said positions"
GAGAGAGA

SEQ ID NO: 63 - protein, 13 aa, Artificial Sequence
  source: /note="Description of Artificial Sequence: Synthetic peptide"
  source: /note="N-term may or may not be modified by PEG or half-life prolonging derivative"
  MOD_RES (4)..(4): hArg
  MOD_RES (5)..(5): Cha or NMeLeu
  MOD_RES (6)..(6): May or may not be modified by PEG derivative
  MOD_RES (10)..(10): Oic
  MOD_RES (11)..(11): Nle
  MOD_RES (13)..(13): 4Cl-F
  source: /note="see specification as filed for detailed description of substitutions and preferred embodiments"
LRPRXSHKGXLPF

SEQ ID NO: 64 - protein, 10 aa, Artificial Sequence
  source: /note="Description of Artificial Sequence: Synthetic peptide"
  source: /note="N-term may or may not be modified by PEG derivative"
  MOD_RES (1)..(1): PyroGlu or absent
  MOD_RES (2)..(2): hArg
  MOD_RES (3)..(3): Cha
  MOD_RES (4)..(7): Any amino acid
  MOD_RES (8)..(8): Oic
  MOD_RES (9)..(9): Nle
  MOD_RES (10)..(10): PyroGlu or absent
  source: /note="C-term may or may not be modified by PEG derivative"
  source: /note="see specification as filed for detailed description of substitutions and preferred embodiments"
ERAXXXXXLE

SEQ ID NO: 65 - protein, 10 aa, Artificial Sequence
  source: /note="Description of Artificial Sequence: Synthetic peptide"
  MOD_RES (1)..(1): hArg
  MOD_RES (2)..(2): Cha
  MOD_RES (7)..(7): Oic
  MOD_RES (8)..(8): Nle
  MOD_RES (10)..(10): 4-Cl-F
RASHKGXLPF

SEQ ID NO: 66 - protein, 18 aa, Artificial Sequence
  source: /note="Description of Artificial Sequence: Synthetic peptide"
  MOD_RES (1)..(1): Any amino acid
  MOD_RES (2)..(5): Any amino acid or absent
  MOD_RES (6)..(6): Nonfunctional, hydrophobic or polar amino acid or absent
  MOD_RES (7)..(7): Polar or basic amino acid or absent
  MOD_RES (8)..(8): Nonfunctional or hydrophobic amino acid
  MOD_RES (9)..(9): Basic or polar amino acid
  MOD_RES (10)..(10): Nonfunctional or hydrophobic amino acid
  MOD_RES (11)..(11): Nonfunctional, polar or hydrophobic amino acid
  MOD_RES (12)..(12): Nonfunctional, polar, basic or hydrophobic amino acid
  MOD_RES (13)..(13): Nonfunctional, hydrophobic, polar or basic amino acid
  MOD_RES (14)..(14): Nonfunctional or aromatic amino acid
  MOD_RES (15)..(15): Nonfunctional or hydrophilic amino acid
  MOD_RES (16)..(16): Nonfunctional, polar or hydrophobic amino acid
  MOD_RES (17)..(17): Nonfunctional or hydrophobic amino acid
  MOD_RES (18)..(18): Hydrophobic amino acid or absent
  source: /note="see specification as filed for detailed description of substitutions and preferred embodiments"
XXXXXXXXXXXXXXXXXX

SEQ ID NO: 67 - protein, 12 aa, Artificial Sequence
  source: /note="Description of Artificial Sequence: Synthetic peptide"
  MOD_RES (1)..(1): PyroGlu
  MOD_RES (4)..(4): hArg
  MOD_RES (5)..(5): Cha
  MOD_RES (6)..(6): Pra(NPEG9)
  MOD_RES (10)..(10): Oic
  MOD_RES (11)..(11): Nle
  MOD_RES (12)..(12): 4-Cl-F
ERPRAGHKGXLF

SEQ ID NO: 68 - protein, 14 aa, Artificial Sequence
  source: /note="Description of Artificial Sequence: Synthetic peptide"
  source: /note="N-term Acetyl"
  MOD_RES (1)..(1): Pra20K
  MOD_RES (5)..(5): hArg
  MOD_RES (6)..(6): NMeLeu
  MOD_RES (7)..(7): Pra20K
  MOD_RES (12)..(12): Nle
  MOD_RES (14)..(14): 4-Cl-F
GLRPRLGHKGPLPF

SEQ ID NO: 69 - protein, 13 aa, Artificial Sequence
  source: /note="Description of Artificial Sequence: Synthetic peptide"
  MOD_RES (1)..(1): PyroGlu
  MOD_RES (4)..(4): hArg
  MOD_RES (5)..(5): NMeLeu
  MOD_RES (6)..(6): Pra20K
  MOD_RES (10)..(10): Oic
  MOD_RES (11)..(11): Nle
  MOD_RES (13)..(13): 4-Cl-F
ERPRLGHKGXLPF

SEQ ID NO: 70 - protein, 13 aa, Artificial Sequence
  source: /note="Description of Artificial Sequence: Synthetic peptide"
  source: /note="N-term Acetyl"
  MOD_RES (1)..(1): Pra20K
  MOD_RES (5)..(5): hArg
  MOD_RES (6)..(6): Cha
  MOD_RES (12)..(12): Nle
  MOD_RES (13)..(13): D-1Nal
GLRPRASHKGPLA

SEQ ID NO: 71 - protein, 14 aa, Artificial Sequence
  source: /note="Description of Artificial Sequence: Synthetic peptide"
  source: /note="N-term Acetyl"
  MOD_RES (1)..(1): Pra20K
  MOD_RES (2)..(2): Ahx
  MOD_RES (6)..(6): hArg
  MOD_RES (7)..(7): Cha
  MOD_RES (13)..(13): Nle
  MOD_RES (14)..(14): D-1Nal
GXLRPRASHKGPLA

SEQ ID NO: 72 - protein, 14 aa, Artificial Sequence
  source: /note="Description of Artificial Sequence: Synthetic peptide"
  MOD_RES (1)..(1): PyroGlu
  MOD_RES (4)..(4): hArg
  MOD_RES (5)..(5): NMeLeu
  MOD_RES (11)..(11): Nle
  MOD_RES (13)..(13): D-Bip
  MOD_RES (14)..(14): K(Ac-Pra(20K-mPEG))
ERPRLSHKGPLPFK

SEQ ID NO: 73 - protein, 12 aa, Artificial Sequence
  source: /note="Description of Artificial Sequence: Synthetic peptide"
  MOD_RES (1)..(1): PyroGlu
  MOD_RES (4)..(4): hArg
  MOD_RES (5)..(5): NMeLeu
  MOD_RES (6)..(6): Pra20K
  MOD_RES (10)..(10): Oic
  MOD_RES (11)..(11): Nle
  MOD_RES (12)..(12): 4-Cl-F
ERPRLGHKGXLF

SEQ ID NO: 74 - protein, 12 aa, Artificial Sequence
  source: /note="Description of Artificial Sequence: Synthetic peptide"
  MOD_RES (1)..(1): PyroGlu
  MOD_RES (4)..(4): hArg
  MOD_RES (5)..(5): Cha
  MOD_RES (6)..(6): Pra20K
  MOD_RES (10)..(10): Oic
  MOD_RES (11)..(11): Nle
  MOD_RES (12)..(12): 4-Cl-F
ERPRAGHKGXLF

SEQ ID NO: 75 - protein, 12 aa, Artificial Sequence
  source: /note="Description of Artificial Sequence: Synthetic peptide"
  MOD_RES (1)..(1): PyroGlu
  MOD_RES (4)..(4): hArg
  MOD_RES (5)..(5): NMeLeu
  MOD_RES (7)..(7): Pra20K
  MOD_RES (10)..(10): Oic
  MOD_RES (11)..(11): Nle
  MOD_RES (12)..(12): D-Phe
ERPRLFGKGXLF

SEQ ID NO: 76 - protein, 6 aa, Artificial Sequence
  source: /note="Description of Artificial Sequence: Synthetic peptide"
  MOD_RES (1)..(2): Any amino acid
  MOD_RES (4)..(5): Any amino acid
XXNXXG

SEQ ID NO: 77 - protein, 8 aa, Artificial Sequence
  source: /note="Description of Artificial Sequence: Synthetic peptide"
  misc_feature (1)..(8): /note="This sequence may encompass 1-8 residues"
  VARIANT (2)..(8): /replace=" "
  misc_feature (2)..(8): /note="Residues given in the sequence have no preference with respect to those in the annotations for said positions"
GGGGGGGG

SEQ ID NO: 78 - protein, 3 aa, Artificial Sequence
  source: /note="Description of Artificial Sequence: Synthetic peptide"
GGG

SEQ ID NO: 79 - protein, 4 aa, Artificial Sequence
  source: /note="Description of Artificial Sequence: Synthetic peptide"
GGGG

SEQ ID NO: 80 - protein, 5 aa, Artificial Sequence
  source: /note="Description of Artificial Sequence: Synthetic peptide"
GGGGG

SEQ ID NO: 81 - protein, 7 aa, Artificial Sequence
  source: /note="Description of Artificial Sequence: Synthetic peptide"
GGGGGGG

SEQ ID NO: 82 - protein, 5 aa, Artificial Sequence
  source: /note="Description of Artificial Sequence: Synthetic peptide"
GGGGS

SEQ ID NO: 83 - protein, 15 aa, Artificial Sequence
  source: /note="Description of Artificial Sequence: Synthetic peptide"
GGGGSGGGGSGGGGS

SEQ ID NO: 84 - protein, 8 aa, Artificial Sequence
  source: /note="Description of Artificial Sequence: Synthetic peptide"
  misc_feature (1)..(8): /note="This sequence may encompass 1-8 residues"
  VARIANT (2)..(8): /replace=" "
  misc_feature (2)..(8): /note="Residues given in the sequence have no preference with respect to those in the annotations for said positions"
AAAAAAAA

SEQ ID NO: 85 - protein, 6 aa, Artificial Sequence
  source: /note="Description of Artificial Sequence: Synthetic peptide"
GGGGGK

SEQ ID NO: 86 - protein, 7 aa, Artificial Sequence
  source: /note="Description of Artificial Sequence: Synthetic peptide"
GGGGGKR

SEQ ID NO: 87 - protein, 8 aa, Artificial Sequence
  source: /note="Description of Artificial Sequence: Synthetic peptide"
GGGKGGGG

SEQ ID NO: 88 - protein, 8 aa, Artificial Sequence
  source: /note="Description of Artificial Sequence: Synthetic peptide"
GGGNGSGG

SEQ ID NO: 89 - protein, 8 aa, Artificial Sequence
  source: /note="Description of Artificial Sequence: Synthetic peptide"
GGGCGGGG

SEQ ID NO: 90 - protein, 5 aa, Artificial Sequence
  source: /note="Description of Artificial Sequence: Synthetic peptide"
GPNGG

SEQ ID NO: 91 - protein, 8 aa, Artificial Sequence
  source: /note="Description of Artificial Sequence: Synthetic peptide"
GGGKGGGG

SEQ ID NO: 92 - protein, 5 aa, Artificial Sequence
  source: /note="Description of Artificial Sequence: Synthetic peptide"
GGGGS

SEQ ID NO: 93 - protein, 10 aa, Artificial Sequence
  source: /note="Description of Artificial Sequence: Synthetic peptide"
GGGGSGGGGS

SEQ ID NO: 94 - protein, 20 aa, Artificial Sequence
  source: /note="Description of Artificial Sequence: Synthetic peptide"
GGGGSGGGGSGGGGSGGGGS

SEQ ID NO: 95 - protein, 25 aa, Artificial Sequence
  source: /note="Description of Artificial Sequence: Synthetic peptide"
GGGGSGGGGSGGGGSGGGGSGGGGS

SEQ ID NO: 96 - protein, 6 aa, Artificial Sequence
  source: /note="Description of Artificial Sequence: Synthetic peptide"
GGEGGG

SEQ ID NO: 97 - protein, 8 aa, Artificial Sequence
  source: /note="Description of Artificial Sequence: Synthetic peptide"
GGEEEGGG

SEQ ID NO: 98 - protein, 5 aa, Artificial Sequence
  source: /note="Description of Artificial Sequence: Synthetic peptide"
GEEEG

SEQ ID NO: 99 - protein, 4 aa, Artificial Sequence
  source: /note="Description of Artificial Sequence: Synthetic peptide"
GEEE

SEQ ID NO: 100 - protein, 6 aa, Artificial Sequence
  source: /note="Description of Artificial Sequence: Synthetic peptide"
GGDGGG

SEQ ID NO: 101 - protein, 7 aa, Artificial Sequence
  source: /note="Description of Artificial Sequence: Synthetic peptide"
GGDDDGG

SEQ ID NO: 102 - protein, 5 aa, Artificial Sequence
  source: /note="Description of Artificial Sequence: Synthetic peptide"
GDDDG

SEQ ID NO: 103 - protein, 4 aa, Artificial Sequence
  source: /note="Description of Artificial Sequence: Synthetic peptide"
GDDD

SEQ ID NO: 104 - protein, 5 aa, Artificial Sequence
  source: /note="Description of Artificial Sequence: Synthetic peptide"
WEWEW

SEQ ID NO: 105 - protein, 5 aa, Artificial Sequence
  source: /note="Description of Artificial Sequence: Synthetic peptide"
FEFEF

SEQ ID NO: 106 - protein, 6 aa, Artificial Sequence
  source: /note="Description of Artificial Sequence: Synthetic peptide"
EEEWWW

SEQ ID NO: 107 - protein, 6 aa, Artificial Sequence
  source: /note="Description of Artificial Sequence: Synthetic peptide"
EEEFFF

SEQ ID NO: 108 - protein, 7 aa, Artificial Sequence
  source: /note="Description of Artificial Sequence: Synthetic peptide"
WWEEEWW

SEQ ID NO: 109 - protein, 7 aa, Artificial Sequence
  source: /note="Description of Artificial Sequence: Synthetic peptide"
FFEEEFF

SEQ ID NO: 110 - protein, 6 aa, Artificial Sequence
  source: /note="Description of Artificial Sequence: Synthetic peptide"
  MOD_RES (1)..(2): Any amino acid
  MOD_RES (4)..(5): Any amino acid
XXYXXG

SEQ ID NO: 111 - protein, 6 aa, Artificial Sequence
  source: /note="Description of Artificial Sequence: Synthetic peptide"
  MOD_RES (1)..(2): Any amino acid
  MOD_RES (4)..(5): Any amino acid
XXSXXG

SEQ ID NO: 112 - protein, 6 aa, Artificial Sequence
  source: /note="Description of Artificial Sequence: Synthetic peptide"
  MOD_RES (1)..(2): Any amino acid
  MOD_RES (4)..(5): Any amino acid
XXTXXG

SEQ ID NO: 113 - protein, 22 aa, Artificial Sequence
  source: /note="Description of Artificial Sequence: Synthetic peptide"
GSGSATGGSGSTASSGSGSATH

SEQ ID NO: 114 - protein, 22 aa, Artificial Sequence
  source: /note="Description of Artificial Sequence: Synthetic peptide"
HGSGSATGGSGSTASSGSGSAT

SEQ ID NO: 115 - protein, 19 aa, Artificial Sequence
  source: /note="Description of Artificial Sequence: Synthetic peptide"
AEAAAKEAAAKEAAAKAGG

SEQ ID NO: 116 - protein, 18 aa, Artificial Sequence
  source: /note="Description of Artificial Sequence: Synthetic peptide"
  source: /note="N-term may or may not be modified by PEG or half-life prolonging derivative"
  MOD_RES (1)..(1): PyroGlu or absent
  MOD_RES (9)..(9): hArg
  MOD_RES (10)..(10): Cha or NMeLeu
  misc_feature (11)..(12): /note="May or may not be modified by PEG or a half-life prolonging derivative"
  VARIANT (15)..(15): /replace="Oic" or "other secondary amino acid"
  misc_feature (15)..(15): /note="Residue given in the sequence has no preference with respect to those in the annotations for said position"
  MOD_RES (16)..(16): Nle
  VARIANT (18)..(18): /replace="4-Cl-F" or "an aliphatic amino acid" or "an aromatic amino acid" or " "
  misc_feature (18)..(18): /note="Residue given in the sequence has no preference with respect to those in the annotations for said position"
  source: /note="see specification as filed for detailed description of substitutions and preferred embodiments"
XKFRRQRPRXSHKGPLPF

SEQ ID NO: 117 - protein, 18 aa, Artificial Sequence
  source: /note="Description of Artificial Sequence: Synthetic peptide"
  source: /note="N-term may or may not be modified by PEG"
  MOD_RES (1)..(1): PyroGlu or absent
  MOD_RES (9)..(9): hArg
  MOD_RES (10)..(10): Cha
  MOD_RES (15)..(15): Oic
  MOD_RES (16)..(16): Nle
  MOD_RES (18)..(18): 4-Cl-F
XKFRRQRPRASHKGXLPF

SEQ ID NO: 118 - protein, 13 aa, Artificial Sequence
  source: /note="Description of Artificial Sequence: Synthetic peptide"
  source: /note="N-term may or may not be modified by PEG or half-life prolonging derivative"
  VARIANT (1)..(1): /replace="Leu" or "Val" or "Ile" or "Phe" or "Tyr" or "Ala" or "PyroGlu" or " "
  misc_feature (1)..(1): /note="Residue given in the sequence has no preference with respect to those in the annotations for said position"
  MOD_RES (4)..(4): hArg
  MOD_RES (5)..(5): Cha or NMeLeu
  misc_feature (5)..(5): /note="May or may not be modified by half-life prolonging derivative"
  misc_feature (6)..(6): /note="May or may not be modified by PEG derivative"
  misc_feature (7)..(7): /note="May or may not be modified by PEG or half-life prolonging derivative"
  VARIANT (10)..(10): /replace="Oic" or "other secondary amino acid"
  misc_feature (10)..(10): /note="Residue given in the sequence has no preference with respect to those in the annotations for said position"
  MOD_RES (11)..(11): Nle
  VARIANT (13)..(13): /replace="4-Cl-F" or "an aliphatic amino acid" or "aromatic amino acid" or " "
  misc_feature (13)..(13): /note="Residue given in the sequence has no preference with respect to those in the annotations for said position"
  source: /note="see specification as filed for detailed description of substitutions and preferred embodiments"
QRPRXSHKGPLPF

SEQ ID NO: 119 - protein, 14 aa, Artificial Sequence
  source: /note="Description of Artificial Sequence: Synthetic peptide"
  source: /note="N-term may or may not be modified by PEG or half-life prolonging derivative"
  MOD_RES (1)..(1): PyroGlu or absent
  VARIANT (2)..(2): /replace=" "
  misc_feature (2)..(2): /note="Residue given in the sequence has no preference with respect to that in the annotation for said position"
  misc_feature (2)..(2): /note="May or may not be modified by PEG derivative"
  MOD_RES (5)..(5): hArg
  MOD_RES (6)..(6): Cha or NMeLeu
  misc_feature (6)..(6): /note="May or may not be modified by PEG derivative"
  misc_feature (7)..(8): /note="May or may not be modified by PEG or half-life prolonging derivative"
  MOD_RES (11)..(11): Oic
  MOD_RES (12)..(12): Nle
  MOD_RES (14)..(14): 4Cl-F
  source: /note="see specification as filed for detailed description of substitutions and preferred embodiments"
XLRPRXSHKGXLPF

SEQ ID NO: 120 - protein, 17 aa, Artificial Sequence
  source: /note="Description of Artificial Sequence: Synthetic peptide"
  source: /note="N-term may or may not be modified by PEG or half-life prolonging derivative"
  VARIANT (1)..(1): /replace="Orn" or " "
  VARIANT (2)..(2): /replace="an aromatic amino acid" or " "
  VARIANT (3)..(4): /replace="Lys" or "Gln" or "hArg" or "NMe-Arg" or "Cit" or " "
  VARIANT (5)..(5): /replace="Ile" or "Val" or "Nle" or "Nva" or "Leu"
  VARIANT (6)..(6): /replace="Lys" or "Gln" or "hArg" or "NMe-Arg" or "Cit" or " "
  misc_feature (1)..(6): /note="Residues given in the sequence have no preference with respect to those in the annotations for said positions"
  MOD_RES (8)..(8): hArg
  MOD_RES (9)..(9): Cha or NMeLeu
  misc_feature (10)..(11): /note="May or may not be modified by PEG or half-life prolonging derivative"
  VARIANT (14)..(14): /replace="Oic" or "other secondary amino acid"
  misc_feature (14)..(14): /note="Residue given in the sequence has no preference with respect to that in the annotation for said position"
  MOD_RES (15)..(15): Nle
  VARIANT (17)..(17): /replace="4-Cl-F" or "4-F-F" or "4-I-F" or "1-Nal" or "2-Nal" or "Bip" or "Dip" or "Tic" or "aromatic amino acid"
  misc_feature (17)..(17): /note="Residues may be present in the L- or D-optical configuration"
  misc_feature (17)..(17): /note="Residue given in the sequence has no preference with respect to those in the annotations for said position"
  source: /note="see specification as filed for detailed description of substitutions and preferred embodiments"
KFRRQRPRXSHKGPLPF

SEQ ID NO: 121 - protein, 17 aa, Artificial Sequence
  source: /note="Description of Artificial Sequence: Synthetic peptide"
  source: /note="N-term may or may not be modified by PEG or other moiety to extend circulating half-life"
  VARIANT (1)..(1): /replace="His" or "Tyr" or "Phe" or "2Pal" or "3Pal" or "4Pal" or "Orn" or "Dpr" or "Dab" or " "
  misc_feature (1)..(1): /note="May or may not be modified by PEG or other moiety to extend circulating half-life"
  VARIANT (2)..(2): /replace="Tyr" or "Trp" or " "
  misc_feature (2)..(2): /note="May or may not be modified by PEG or other moiety to extend circulating half-life"
  VARIANT (3)..(4): /replace="Lys" or "Gln" or "His" or "Tyr" or "Phe" or "Ala" or "Pro" or "Ser" or "Leu" or "Ile" or "2Pal" or "3Pal" or "4Pal" or "Orn" or "Dpr" or "Dab" or "hArg" or "NMe-Arg" or "Cit" or " "
  misc_feature (3)..(4): /note="May or may not be modified by PEG or other moiety to extend circulating half-life"
  VARIANT (5)..(5): /replace="Leu" or "Val" or "Ile" or "Phe" or "Tyr" or "Ala" or "PyroGlu" or " "
  misc_feature (5)..(5): /note="May or may not be modified by PEG or other moiety to extend circulating half-life"
  VARIANT (6)..(6): /replace="Lys" or "2Pal" or "3Pal" or "4Pal" or "Orn" or "Dpr" or "Dab" or "hArg" or "NMe-Arg" or "Cit"
  VARIANT (7)..(7): /replace="Gly" or "Oic" or "other secondary amino acid"
  VARIANT (8)..(8): /replace="Lys" or "2Pal" or "3Pal" or "4Pal" or "Orn" or "Dpr" or "Dab" or "hArg" or "NMe-Arg" or "Cit"
  MOD_RES (9)..(9): Cha or NMeLeu
  misc_feature (10)..(11): /note="May or may not be modified by PEG or other moiety to extend circulating half-life"
  VARIANT (12)..(12): /replace="a basic amino acid" or "an aliphatic amino acid" or "an aromatic amino acid"
  VARIANT (13)..(13): /replace="Ala" or "Pro"
  VARIANT (14)..(14): /replace="Oic" or "hPro" or "Tic" or "Tiq" or "other secondary amino acid"
  VARIANT (15)..(15): /replace="Leu" or "Val" or "Ile" or "Nle" or "Cha" or "other aliphatic amino acid"
  VARIANT (16)..(16): /replace="Oic" or "hPro" or "Tic" or "Tiq" or "other aliphatic amino acid" or "aromatic amino acid"
  VARIANT (17)..(17): /replace="4-Cl-F" or "4-F-F" or "4-I-F" or "1-Nal" or "2-Nal" or "Bip" or "Dip" or "Tic" or "other aromatic amino acid" or " "
  misc_feature (17)..(17): /note="Residues may be present in the L- or D-optical configuration"
  source: /note="see specification as filed for detailed description of substitutions and preferred embodiments"
KFRRQRPRXSHKGPMPF

SEQ ID NO: 122 - protein, 13 aa, Artificial Sequence
  source: /note="Description of Artificial Sequence: Synthetic peptide"
  source: /note="N-term Thiopropionyl(20K-mPEG)"
  MOD_RES (4)..(4): hArg
  MOD_RES (5)..(5): Cha
  MOD_RES (10)..(10): Oic
  MOD_RES (11)..(11): Nle
  MOD_RES (13)..(13): 4-Cl-F
LRPRASHKGXLPF

SEQ ID NO: 123 - protein, 17 aa, Artificial Sequence
  source: /note="Description of Artificial Sequence: Synthetic peptide"
  source: /note="N-term Thiopropionyl(20K-mPEG)"
  MOD_RES (8)..(8): hArg
  MOD_RES (9)..(9): Cha
  MOD_RES (14)..(14): Oic
  MOD_RES (15)..(15): Nle
  MOD_RES (17)..(17): 4-Cl-F
KFRRQRPRASHKGXLPF

SEQ ID NO: 124 - protein, 14 aa, Artificial Sequence
  source: /note="Description of Artificial Sequence: Synthetic peptide"
  source: /note="N-term Thiopropionyl(20K-mPEG)"
  MOD_RES (5)..(5): hArg
  MOD_RES (6)..(6): Cha
  MOD_RES (11)..(11): Oic
  MOD_RES (12)..(12): Nle
  MOD_RES (14)..(14): 4-Cl-F
LLRPRASHKGXLPF

SEQ ID NO: 125 - protein, 18 aa, Artificial Sequence
  source: /note="Description of Artificial Sequence: Synthetic peptide"
  source: /note="N-term may or may not be modified by acyl, aryl, or alkyl group, a conjugation linker, NPeg11, a PEG derivative or other serum half-life prolonging group"
  MOD_RES (1)..(1): Atz(PEG10) or any amino acid or absent
  VARIANT (2)..(2): /replace="Orn" or "MerPr" or "Pra" or "Atz(PEG10)"
  VARIANT (3)..(3): /replace="Ala" or "Pra" or "MerPr" or "Atz(PEG10)"
  VARIANT (4)..(4): /replace="2Pal" or "3Pal" or "Cit" or "hArg" or "Orn" or "MerPr" or "Ala" or "Glu" or "Phe" or "His" or "Ile" or "Lys" or "Leu" or "Pro" or "Gln" or "Ser" or "Thr" or "Val" or "Trp" or "Tyr" or "NMeArg" or "Pra" or "Atz(PEG10)"
  VARIANT (5)..(5): /replace="2Pal" or "3Pal" or "Cit" or "hArg" or "Orn" or "Pra" or "MerPr" or "Ala" or "Glu" or "Phe" or "His" or "Ile" or "Lys" or "Leu" or "Pro" or "Gln" or "Ser" or "Thr" or "Val" or "Trp" or "Tyr" or "NMeArg" or "Atz(PEG10)"
  VARIANT (6)..(6): /replace="Asn" or "Glu" or "Asp" or "Leu" or "Val" or "Ile" or "Pro" or "His" or "Trp" or "Phe" or "Tyr" or "Ala" or "1-Nal" or "2-Nal" or "Bip" or "Cha" or "Nle" or "Pra" or "MerPr" or "PyroGlu" or "Atz(PEG10)"
  VARIANT (7)..(7): /replace="Ala" or "Lys" or "Gln" or "Pra" or "MerPr" or "2Pal" or "3Pal" or "4Pal" or "Orn" or "Dpr" or "Dab" or "hArg" or "NMe-Arg" or "Cit" or "Atz(PEG10)"
  misc_feature (2)..(7): /note="Residues given in the sequence have no preference with respect to those in the annotations for said positions"
  VARIANT (9)..(9): /replace="Lys" or "Gln" or "2Pal" or "3Pal" or "4Pal" or "Orn" or "Dpr" or "Dab" or "hArg" or "NMe-Arg" or "Cit" or "Pra" or "Leu" or "Atz(PEG10)"
  VARIANT (10)..(10): /replace="Ala" or "Phe" or "Gln" or "Ser" or "2-Nal" or "Bip" or "Cha" or "Chg" or "pI-Phe" or "Pra" or "NMeLeu"
  VARIANT (11)..(11): /replace="1-Nal" or "2-Nal" or "2Pal" or "3Pal" or "4-Cl-F" or "4-F-F" or "4-I-F" or "4-Me-F" or "Abu" or "Bip" or "Cha" or "Chg" or "Cit" or "Cpg" or "Dab" or "Dap" or "Dip" or "Nle" or "NMe-Phe" or "Nva" or "Orn" or "Atz(PEG10)" or "Pra" or "Tic" or
  VARIANT (11)..(11): /replace="Ala" or "Phe" or "Gly" or "His" or "Ile" or "Leu" or "Arg" or "Thr" or "Val" or "Trp" or "Tyr"
  VARIANT (12)..(12): /replace="1-Nal" or "2-Nal" or "2Pal" or "3Pal" or "4-Cl-F" or "4-F-F" or "4-I-F" or "Abu" or "Bip" or "Cha" or "Chg" or "Cpg" or "Dab" or "Dap" or "Dip" or "Nle" or "NMe-Phe" or "Nva" or "Orn" or "Atz(PEG10)" or "Pra" or "Tic" or "Ala" or "Phe" or
  VARIANT (12)..(12): /replace="Gly" or "D-His" or "Ile" or "Lys" or "Leu" or "Arg" or "Thr" or "Val" or "Trp" or "Tyr"
  misc_feature (9)..(12): /note="Residues given in the sequence have no preference with respect to those in the annotations for said positions"
  VARIANT (15)..(15): /replace="Oic" or "hPro" or "Tic" or "Tiq" or "Thz" or "1-Nal" or "Pra" or "Atz(PEG10)"
  VARIANT (16)..(16): /replace="4-Cl-F" or "4-F-F" or "4-Me-F" or "Bip" or "Cha" or "Nle" or "NMeLeu" or "pI-Phe" or "Atz(PEG10)" or "Pra" or "Ala" or "Phe" or "Pro" or "Ser"
  misc_feature (15)..(16): /note="Residues given in the sequence have no preference with respect to those in the annotations for said positions"
  VARIANT (18)..(18): /replace="1-Nal" or "2-Nal" or "4-Cl-F" or "4-F-F" or "4-Me-F" or "4-NO2-F" or "D-1Nal" or "D-Bip" or "NMePhe" or "pI-Phe" or "Atz(PEG10)" or "Pra" or "Ala" or "Lys" or "D-Phe" or "Gly" or "Pro" or "D-Trp" or "Trp" or "D-Tyr" or "Tyr" or "Bip" or
  VARIANT (18)..(18): /replace="Dip" or "Tic" or "an aromatic amino acid"
  misc_feature (18)..(18): /note="Residues may be present in the L- or D-optical configuration"
  misc_feature (18)..(18): /note="Residue given in the sequence has no preference with respect to those in the annotations for said position"
  source: /note="see specification as filed for detailed description of substitutions and preferred embodiments"
XKFRRQRPRLSHKGPMPF

SEQ ID NO: 126 - protein, 18 aa, Artificial Sequence
  source: /note="Description of Artificial Sequence: Synthetic peptide"
  MOD_RES (1)..(1): Atz(20K-mPEG)
  MOD_RES (9)..(9): hArg
  MOD_RES (10)..(10): Cha
  MOD_RES (15)..(15): Oic
  MOD_RES (16)..(16): Nle
  MOD_RES (18)..(18): 4-Cl-F
AKFRRQRPRASHKGXLPF

SEQ ID NO: 127 - protein, 14 aa, Artificial Sequence
  source: /note="Description of Artificial Sequence: Synthetic peptide"
  MOD_RES (1)..(1): Atz(20K-mPEG)
  MOD_RES (5)..(5): hArg
  MOD_RES (6)..(6): Cha
  MOD_RES (11)..(11): Oic
  MOD_RES (12)..(12): Nle
  MOD_RES (14)..(14): 4-Cl-F
ALRPRASHKGXLPF

SEQ ID NO: 128 - protein, 13 aa, Artificial Sequence
  source: /note="Description of Artificial Sequence: Synthetic peptide"
  MOD_RES (1)..(1): PyroGlu
ERPRLSHKGPMPF

SEQ ID NO: 129 - protein, 18 aa, Artificial Sequence
  source: /note="Description of Artificial Sequence: Synthetic peptide"
  source: /note="N-term may or may not be modified by conjugation linker, an acyl group, an aryl group, an alkyl group, NPeg11, a PEG derivative or other serum half-life prolonging group"
  MOD_RES (1)..(1): Atz(PEG10) or any amino acid or absent
  VARIANT (2)..(2): /replace="Orn" or "MerPr" or "Pra" or "Atz(PEG10)" or "NPeg11 modified amino acid"
  VARIANT (3)..(3): /replace="Ala" or "Pra" or "MerPr" or "Atz(PEG10)"
  VARIANT (4)..(4): /replace="2Pal" or "3Pal" or "Cit" or "hArg" or "Orn" or "MerPr" or "Ala" or "Glu" or "Phe" or "His" or "Ile" or "Lys" or "Leu" or "Pro" or "Gln" or "Ser" or "Thr" or "Val" or "Trp" or "Tyr" or "NMeArg" or "Pra" or "Atz(PEG10)"
  VARIANT (5)..(5): /replace="2Pal" or "3Pal" or "Cit" or "hArg" or "Orn" or "Pra" or "MerPr" or "Ala" or "Glu" or "Phe" or "His" or "Ile" or "Lys" or "Leu" or "Pro" or "Gln" or "Ser" or "Thr" or "Val" or "Trp" or "Tyr" or "NMeArg" or "Atz(PEG10)"
  VARIANT (6)..(6): /replace="Asn" or "Glu" or "Asp" or "Leu" or "Val" or "Ile" or "Pro" or "His" or "Trp" or "Phe" or "Tyr" or "Ala" or "1-Nal" or "2-Nal" or "Bip" or "Cha" or "Nle" or "Pra" or "MerPr" or "PyroGlu" or "Atz(PEG10)"
  VARIANT (7)..(7): /replace="Ala" or "Lys" or "Gln" or "Pra" or "MerPr" or "2Pal" or "3Pal" or "4Pal" or "Orn" or "Dpr" or "Dab" or "hArg" or "NMe-Arg" or "Cit" or "Atz(PEG10)"
  VARIANT (8)..(8)<<223> /replace="Oic" or "Tic" or "Ala" or "Arg" or "Aib" or "Gly"or "Pra" or "Atz(PEG10)"
  VARIANT (9)..(9): /replace="Lys" or "Gln" or "2Pal" or "3Pal" or "4Pal" or "Orn" or "Dpr" or "Dab" or "hArg" or "NMe-Arg" or "Cit" or "Pra" or "Leu" or "Atz(PEG10)"
  VARIANT (10)..(10): /replace="Ala" or "Phe" or "Gln" or "Ser" or "2-Nal" or "Bip" or "Cha" or "Chg" or "pI-Phe" or "Pra" or "NMeLeu"
  VARIANT (11)..(11): /replace="1-Nal" or "2-Nal" or "2Pal" or "3Pal" or "4-Cl-F" or "4-F-F" or "4-I-F" or "4-Me-F" or "Abu" or "Bip" or "Cha" or "Chg" or "Cit" or "Cpg" or "Dab" or "Dap" or "Dip" or "Nle" or "NMe-Phe" or "Nva" or "Orn" or "Atz(PEG10)" or "Pra" or
  VARIANT (11)..(11): /replace="Tic" or "Ala" or "Phe" or "Gly" or "His" or "Ile" or "Leu" or "Arg" or "Thr" or "Val" or "Trp" or "Tyr"
  VARIANT (12)..(12): /replace="1-Nal" or "2-Nal" or "2Pal" or "3Pal" or "4-Cl-F" or "4-F-F" or "4-I-F" or "Abu" or "Bip" or "Cha" or "Chg" or "Cpg" or "Dab" or "Dap" or "Dip" or "Nle" or "NMe-Phe" or "Nva" or "Orn" or "Atz(PEG10)" or "Pra" or "Tic" or "Ala" or "Phe" or
  VARIANT (12)..(12): /replace="Gly" or "D-His" or "Ile" or "Lys" or "Leu" or "Arg" or "Thr" or "Val" or "Trp" or "Tyr"
  VARIANT (13)..(13): /replace="1-Nal" or "2-Nal" or "2Pal" or "3Pal" or "4AmP" or "4-Cl-F" or "4-F-F" or "4-I-F" or "Bip" or "Cha" or "Chg" or "Cpg" or "Dab" or "Dap" or "Dip" or "Dpr" or "hArg" or "K(Me2)" or "LYSIPR" or "Nle" or "Nva" or "Orn" or "Pra" or "Ala" or
  VARIANT (13)..(13): /replace="Phe" or "Gly" or "His" or "Arg" or "Val" or "Trp" or "Atz(PEG10)"
  VARIANT (14)..(14): /replace="bAla" or "Hyp" or "Oic" or "Pra" or "Sar" or "Thz" or "Ala" or "Pro" or "Aib" or "Atz(PEG10)"
  VARIANT (15)..(15): /replace="Oic" or "hPro" or "Tic" or "Tiq" or "Thz" or "1-Nal" or "Pra" or "Atz(PEG10)"
  VARIANT (16)..(16): /replace="4-Cl-F" or "4-F-F" or "4-Me-F" or "Bip" or "Cha" or "Nle" or "NMeLeu" or "pI-Phe" or "Atz(PEG10)" or "Pra" or "Ala" or "Phe" or "Pro" or "Ser"
  VARIANT (17)..(17): /replace="1-Nal" or "4-Cl-F" or "4-F-F" or "4-Me-F" or "D-1Nal" or "D-Bip" or "Nle" or "NMePhe" or "Oic" or "Tic" or "D-Phe" or "Phe" or "D-Trp" or "D-Tyr" or "Gly" or "Pra" or "Atz(PEG10)"
  VARIANT (18)..(18): /replace="1-Nal" or "2-Nal" or "4-Cl-F" or "4-F-F" or "4-Me-F" or "4-NO2-F" or "D-1Nal" or "D-Bip" or "NMePhe" or "pI-Phe" or "Atz(PEG10)" or "Pra" or "Ala" or "Lys" or "D-Phe" or "Gly" or "Pro" or "D-Trp" or "Trp" or "D-Tyr" or "Tyr" or "Bip" or
  VARIANT (18)..(18): /replace="Dip" or "Tic" or "an aromatic amino acid"
  misc_feature (18)..(18): /note="Residues may be present in the L- or D-optical configuration"
  misc_feature (2)..(18): /note="Residues given in the sequence have no preference with respect to those in the annotations for said positions"
  source: /note="see specification as filed for detailed description of substitutions and preferred embodiments"
XKFRRQRPRLSHKGPMPF

SEQ ID NO: 130 - protein, 17 aa, Artificial Sequence
  source: /note="Description of Artificial Sequence: Synthetic peptide"
  source: /note="N-term 20K-mPEG-Bis(Thiopropionyl)"
  MOD_RES (8)..(8): hArg
  MOD_RES (9)..(9): Cha
  MOD_RES (14)..(14): Oic
  MOD_RES (15)..(15): Nle
  MOD_RES (17)..(17): 4-Cl-F
  source: /note="see specification as filed for detailed description of substitutions and preferred embodiments"
KFRRQRPRASHKGXLPF

SEQ ID NO: 131 - protein, 17 aa, Artificial Sequence
  source: /note="Description of Artificial Sequence: Synthetic peptide"
  source: /note="N-term 20K-mPEG-Tetrakis(Thiopropionyl)"
  MOD_RES (8)..(8): hArg
  MOD_RES (9)..(9): Cha
  MOD_RES (14)..(14): Oic
  MOD_RES (15)..(15): Nle
  MOD_RES (17)..(17): 4-Cl-F
  source: /note="see specification as filed for detailed description of substitutions and preferred embodiments"
KFRRQRPRASHKGXLPF

SEQ ID NO: 132 - protein, 13 aa, Artificial Sequence
  source: /note="Description of Artificial Sequence: Synthetic peptide"
  MOD_RES (1)..(1): PyroGlu
  MOD_RES (5)..(5): Chg
  MOD_RES (12)..(12): 1-Nal
ERPRGFHKGPFAF

SEQ ID NO: 133 - protein, 18 aa, Artificial Sequence
  source: /note="Description of Artificial Sequence: Synthetic peptide"
  source: /note="N-term PEG11-Bis"
  MOD_RES (1)..(1): Atz
  MOD_RES (9)..(9): hArg
  MOD_RES (10)..(10): Cha
  MOD_RES (15)..(15): Oic
  MOD_RES (16)..(16): Nle
  MOD_RES (18)..(18): 4-Cl-F
  source: /note="see specification as filed for detailed description of substitutions and preferred embodiments"
AKFRRQRPRASHKGXLPF

SEQ ID NO: 134 - protein, 18 aa, Artificial Sequence
  source: /note="Description of Artificial Sequence: Synthetic peptide"
  source: /note="N-term PEG23-Bis"
  MOD_RES (1)..(1): Atz
  MOD_RES (9)..(9): hArg
  MOD_RES (10)..(10): Cha
  MOD_RES (15)..(15): Oic
  MOD_RES (16)..(16): Nle
  MOD_RES (18)..(18): 4-Cl-F
  source: /note="see specification as filed for detailed description of substitutions and preferred embodiments"
AKFRRQRPRASHKGXLPF

SEQ ID NO: 135 - protein, 18 aa, Artificial Sequence
  source: /note="Description of Artificial Sequence: Synthetic peptide"
  source: /note="N-term PEG35-Bis"
  MOD_RES (1)..(1): Atz
  MOD_RES (9)..(9): hArg
  MOD_RES (10)..(10): Cha
  MOD_RES (15)..(15): Oic
  MOD_RES (16)..(16): Nle
  MOD_RES (18)..(18): 4-Cl-F
  source: /note="see specification as filed for detailed description of substitutions and preferred embodiments"
AKFRRQRPRASHKGXLPF

SEQ ID NO: 136 - protein, 18 aa, Artificial Sequence
  source: /note="Description of Artificial Sequence: Synthetic peptide"
  source: /note="N-term PEG47-Bis"
  MOD_RES (1)..(1): Atz
  MOD_RES (9)..(9): hArg
  MOD_RES (10)..(10): Cha
  MOD_RES (15)..(15): Oic
  MOD_RES (16)..(16): Nle
  MOD_RES (18)..(18): 4-Cl-F
  source: /note="see specification as filed for detailed description of substitutions and preferred embodiments"
AKFRRQRPRASHKGXLPF

SEQ ID NO: 137 - protein, 13 aa, Artificial Sequence
  source: /note="Description of Artificial Sequence: Synthetic peptide"
  MOD_RES (1)..(1): PyroGlu
  MOD_RES (5)..(5): NMeLeu
  MOD_RES (12)..(12): 1-Nal
ERPRLFHKGPFAF

SEQ ID NO: 138 - protein, 77 aa, Homo sapiens
MNLRLCVQALLLLWLSLTAVCGGSLMPLPDGNGLEDGNVRHLVQPRGSRNGPGPWQGGRRKFRRQRPRLSHKGPMPF

SEQ ID NO: 139 - protein, 16 aa, Artificial Sequence
  source: /note="Description of Artificial Sequence: Synthetic peptide"
  source: /note="N-term Acetyl"
  MOD_RES (1)..(1): Atz(PEG10)
AGGLRPRLSHKGPMPF

SEQ ID NO: 140 - protein, 15 aa, Artificial Sequence
  source: /note="Description of Artificial Sequence: Synthetic peptide"
  source: /note="N-term Acetyl"
  MOD_RES (1)..(1): Atz(PEG10)
AGLRPRLSHKGPMPF

SEQ ID NO: 141 - protein, 14 aa, Artificial Sequence
  source: /note="Description of Artificial Sequence: Synthetic peptide"
  source: /note="N-term Acetyl"
  MOD_RES (1)..(1): Atz(PEG10)
ALRPRLSHKGPMPF

SEQ ID NO: 142 - protein, 13 aa, Artificial Sequence
  source: /note="Description of Artificial Sequence: Synthetic peptide"
  source: /note="N-term Acetyl"
  MOD_RES (1)..(2): Atz(PEG10)
AAPRLSHKGPMPF

SEQ ID NO: 143 - protein, 13 aa, Artificial Sequence
  source: /note="Description of Artificial Sequence: Synthetic peptide"
  MOD_RES (1)..(1): PyroGlu
  MOD_RES (2)..(2): Atz(PEG10)
EAPRLSHKGPMPF

SEQ ID NO: 144 - protein, 13 aa, Artificial Sequence
  source: /note="Description of Artificial Sequence: Synthetic peptide"
  MOD_RES (1)..(1): PyroGlu
  MOD_RES (3)..(3): Atz(PEG10)
ERARLSHKGPMPF

SEQ ID NO: 145 - protein, 13 aa, Artificial Sequence
  source: /note="Description of Artificial Sequence: Synthetic peptide"
  MOD_RES (1)..(1): PyroGlu
  MOD_RES (4)..(4): Atz(PEG10)
ERPALSHKGPMPF

SEQ ID NO: 146 - protein, 13 aa, Artificial Sequence
  source: /note="Description of Artificial Sequence: Synthetic peptide"
  MOD_RES (1)..(1): PyroGlu
  MOD_RES (5)..(5): Atz(PEG10)
ERPRASHKGPMPF

SEQ ID NO: 147 - protein, 13 aa, Artificial Sequence
  source: /note="Description of Artificial Sequence: Synthetic peptide"
  MOD_RES (1)..(1): PyroGlu
  MOD_RES (6)..(6): Atz(PEG10)
ERPRLAHKGPMPF

SEQ ID NO: 148 - protein, 13 aa, Artificial Sequence
  source: /note="Description of Artificial Sequence: Synthetic peptide"
  MOD_RES (1)..(1): PyroGlu
  MOD_RES (7)..(7): Atz(PEG10)
ERPRLSAKGPMPF

SEQ ID NO: 149 - protein, 13 aa, Artificial Sequence
  source: /note="Description of Artificial Sequence: Synthetic peptide"
  MOD_RES (1)..(1): PyroGlu
  MOD_RES (8)..(8): Atz(PEG10)
ERPRLSHAGPMPF

SEQ ID NO: 150 - protein, 13 aa, Artificial Sequence
  source: /note="Description of Artificial Sequence: Synthetic peptide"
  MOD_RES (1)..(1): PyroGlu
  MOD_RES (9)..(9): Atz(PEG10)
ERPRLSHKAPMPF

SEQ ID NO: 151 - protein, 13 aa, Artificial Sequence
  source: /note="Description of Artificial Sequence: Synthetic peptide"
  MOD_RES (1)..(1): PyroGlu
  MOD_RES (10)..(10): Atz(PEG10)
ERPRLSHKGAMPF

SEQ ID NO: 152 - protein, 13 aa, Artificial Sequence
  source: /note="Description of Artificial Sequence: Synthetic peptide"
  MOD_RES (1)..(1): PyroGlu
  MOD_RES (11)..(11): Atz(PEG10)
ERPRLSHKGPAPF

SEQ ID NO: 153 - protein, 13 aa, Artificial Sequence
  source: /note="Description of Artificial Sequence: Synthetic peptide"
  MOD_RES (1)..(1): PyroGlu
  MOD_RES (12)..(12): Atz(PEG10)
ERPRLSHKGPMAF

SEQ ID NO: 154 - protein, 13 aa, Artificial Sequence
  source: /note="Description of Artificial Sequence: Synthetic peptide"
  MOD_RES (1)..(1): PyroGlu
  MOD_RES (13)..(13): Atz(PEG10)
  source: /note="C-term Amide"
ERPRLSHKGPMPA

SEQ ID NO: 155 - protein, 14 aa, Artificial Sequence
  source: /note="Description of Artificial Sequence: Synthetic peptide"
  MOD_RES (1)..(1): PyroGlu
  MOD_RES (14)..(14): Atz(PEG10)
  source: /note="C-term Amide"
ERPRLSHKGPMPFA

SEQ ID NO: 156 - protein, 15 aa, Artificial Sequence
  source: /note="Description of Artificial Sequence: Synthetic peptide"
  MOD_RES (1)..(1): PyroGlu
  MOD_RES (15)..(15): Atz(PEG10)
  source: /note="C-term Amide"
ERPRLSHKGPMPFGA

SEQ ID NO: 157 - protein, 16 aa, Artificial Sequence
  source: /note="Description of Artificial Sequence: Synthetic peptide"
  MOD_RES (1)..(1): PyroGlu
  MOD_RES (16)..(16): Atz(PEG10)
  source: /note="C-term Amide"
ERPRLSHKGPMPFGGA

SEQ ID NO: 158 - protein, 37 aa, Artificial Sequence
  source: /note="Description of Artificial Sequence: Synthetic polypeptide"
  MOD_RES (1)..(1): Atz(PEG10)
  MOD_RES (35)..(35): Nle
ALVQPRGSRNGPGPWQGGRRKFRRQRPRLSHKGPLPF

SEQ ID NO: 159 - protein, 27 aa, Artificial Sequence
  source: /note="Description of Artificial Sequence: Synthetic peptide"
  MOD_RES (1)..(1): Atz(PEG10)
  MOD_RES (25)..(25): Nle
APGPWQGGRRKFRRQRPRLSHKGPLPF

SEQ ID NO: 160 - protein, 18 aa, Artificial Sequence
  source: /note="Description of Artificial Sequence: Synthetic peptide"
  MOD_RES (1)..(1): Atz(PEG10)
  MOD_RES (16)..(16): Nle
AKFRRQRPRLSHKGPLPF

SEQ ID NO: 161 - protein, 14 aa, Artificial Sequence
  source: /note="Description of Artificial Sequence: Synthetic peptide"
  MOD_RES (1)..(1): Atz(PEG10)
  MOD_RES (12)..(12): Nle
AQRPRLSHKGPLPF

SEQ ID NO: 162 - protein, 13 aa, Artificial Sequence
  source: /note="Description of Artificial Sequence: Synthetic peptide"
  MOD_RES (1)..(1): PyroGlu
  MOD_RES (4)..(4): hArg
  MOD_RES (5)..(5): NMeLeu
  MOD_RES (11)..(11): pI-Phe
  MOD_RES (13)..(13): 4-F-F
ERPRLSHKGPFPF

SEQ ID NO: 163 - protein, 13 aa, Artificial Sequence
  source: /note="Description of Artificial Sequence: Synthetic peptide"
  MOD_RES (1)..(1): PyroGlu
  MOD_RES (4)..(4): hArg
  MOD_RES (5)..(5): Cha
  MOD_RES (11)..(11): pI-Phe
  MOD_RES (13)..(13): 4-F-F
ERPRASHKGPFPF

SEQ ID NO: 164 - protein, 13 aa, Artificial Sequence
  source: /note="Description of Artificial Sequence: Synthetic peptide"
  MOD_RES (1)..(1): PyroGlu
  MOD_RES (4)..(4): hArg
  MOD_RES (5)..(5): NMeLeu
  MOD_RES (11)..(11): pI-Phe
  MOD_RES (13)..(13): 4-Me-F
ERPRLSHKGPFPF

SEQ ID NO: 165 - protein, 13 aa, Artificial Sequence
  source: /note="Description of Artificial Sequence: Synthetic peptide"
  MOD_RES (1)..(1): PyroGlu
  MOD_RES (4)..(4): hArg
  MOD_RES (5)..(5): Cha
  MOD_RES (11)..(11): pI-Phe
  MOD_RES (13)..(13): 4-Me-F
ERPRASHKGPFPF

SEQ ID NO: 166 - protein, 13 aa, Artificial Sequence
  source: /note="Description of Artificial Sequence: Synthetic peptide"
  MOD_RES (1)..(1): PyroGlu
  MOD_RES (4)..(4): hArg
  MOD_RES (5)..(5): Cha
  MOD_RES (11)..(11): Nle
  MOD_RES (13)..(13): 4-Me-F
ERPRASHKGPLPF

SEQ ID NO: 167 - protein, 13 aa, Artificial Sequence
  source: /note="Description of Artificial Sequence: Synthetic peptide"
  MOD_RES (1)..(1): PyroGlu
  MOD_RES (4)..(4): hArg
  MOD_RES (5)..(5): Cha
  MOD_RES (11)..(11): Nle
  MOD_RES (13)..(13): D-Bip
ERPRASHKGPLPF

SEQ ID NO: 168 - protein, 13 aa, Artificial Sequence
  source: /note="Description of Artificial Sequence: Synthetic peptide"
  MOD_RES (1)..(1): PyroGlu
  MOD_RES (4)..(4): hArg
  MOD_RES (5)..(5): NMeLeu
  MOD_RES (11)..(11): Nle
  MOD_RES (13)..(13): D-1Nal
ERPRLSHKGPLPA

SEQ ID NO: 169 - protein, 13 aa, Artificial Sequence
  source: /note="Description of Artificial Sequence: Synthetic peptide"
  MOD_RES (1)..(1): PyroGlu
  MOD_RES (4)..(4): hArg
  MOD_RES (5)..(5): NMeLeu
  MOD_RES (11)..(11): pI-Phe
  MOD_RES (13)..(13): D-1Nal
ERPRLSHKGPFPA

SEQ ID NO: 170 - protein, 13 aa, Artificial Sequence
  source: /note="Description of Artificial Sequence: Synthetic peptide"
  MOD_RES (1)..(1): PyroGlu
  MOD_RES (4)..(4): hArg
  MOD_RES (5)..(5): Cha
  MOD_RES (11)..(11): pI-Phe
  MOD_RES (13)..(13): D-1Nal
ERPRASHKGPFPA

SEQ ID NO: 171 - protein, 13 aa, Artificial Sequence
  source: /note="Description of Artificial Sequence: Synthetic peptide"
  MOD_RES (1)..(1): PyroGlu
  MOD_RES (4)..(4): hArg
  MOD_RES (5)..(5): Cha
  MOD_RES (11)..(11): Nle
  MOD_RES (13)..(13): D-1Nal
ERPRASHKGPLPA

SEQ ID NO: 172 - protein, 13 aa, Artificial Sequence
  source: /note="Description of Artificial Sequence: Synthetic peptide"
  MOD_RES (1)..(1): PyroGlu
  MOD_RES (4)..(4): hArg
  MOD_RES (5)..(5): Cha
  MOD_RES (11)..(11): pI-Phe
  MOD_RES (13)..(13): pI-Phe
ERPRASHKGPFPF

SEQ ID NO: 173 - protein, 13 aa, Artificial Sequence
  source: /note="Description of Artificial Sequence: Synthetic peptide"
  MOD_RES (1)..(1): PyroGlu
  MOD_RES (4)..(4): hArg
  MOD_RES (5)..(5): Cha
  MOD_RES (11)..(11): pI-Phe
ERPRASHKGPFPY

SEQ ID NO: 174 - protein, 13 aa, Artificial Sequence
  source: /note="Description of Artificial Sequence: Synthetic peptide"
  MOD_RES (1)..(1): PyroGlu
  MOD_RES (4)..(4): hArg
  MOD_RES (5)..(5): Cha
  MOD_RES (11)..(11): Nle
  MOD_RES (13)..(13): pI-Phe
ERPRASHKGPLPF

SEQ ID NO: 175 - protein, 13 aa, Artificial Sequence
  source: /note="Description of Artificial Sequence: Synthetic peptide"
  MOD_RES (1)..(1): PyroGlu
  MOD_RES (4)..(4): hArg
  MOD_RES (5)..(5): Cha
  MOD_RES (11)..(11): pI-Phe
  MOD_RES (13)..(13): D-Phe
ERPRASHKGPFPF

SEQ ID NO: 176 - protein, 13 aa, Artificial Sequence
  source: /note="Description of Artificial Sequence: Synthetic peptide"
  MOD_RES (1)..(1): PyroGlu
  MOD_RES (4)..(4): hArg
  MOD_RES (5)..(5): Cha
  MOD_RES (11)..(11): Nle
  MOD_RES (13)..(13): D-Phe
ERPRASHKGPLPF

SEQ ID NO: 177 - protein, 13 aa, Artificial Sequence
  source: /note="Description of Artificial Sequence: Synthetic peptide"
  MOD_RES (1)..(1): PyroGlu
  MOD_RES (4)..(4): hArg
  MOD_RES (5)..(5): NMeLeu
  MOD_RES (11)..(11): Nle
  MOD_RES (13)..(13): NMePhe
  source: /note="C-term Amide"
ERPRLSHKGPLPF

SEQ ID NO: 178 - protein, 13 aa, Artificial Sequence
  source: /note="Description of Artificial Sequence: Synthetic peptide"
  MOD_RES (1)..(1): PyroGlu
  MOD_RES (4)..(4): hArg
  MOD_RES (5)..(5): NMeLeu
  MOD_RES (11)..(11): Nle
  MOD_RES (13)..(13): D-Trp
ERPRLSHKGPLPW

SEQ ID NO: 179 - protein, 13 aa, Artificial Sequence
  source: /note="Description of Artificial Sequence: Synthetic peptide"
  MOD_RES (1)..(1): PyroGlu
  MOD_RES (4)..(4): hArg
  MOD_RES (5)..(5): NMeLeu
  MOD_RES (11)..(11): pI-Phe
  MOD_RES (13)..(13): D-Trp
ERPRLSHKGPFPW

SEQ ID NO: 180 - protein, 13 aa, Artificial Sequence
  source: /note="Description of Artificial Sequence: Synthetic peptide"
  MOD_RES (1)..(1): PyroGlu
  MOD_RES (4)..(4): hArg
  MOD_RES (5)..(5): Cha
  MOD_RES (11)..(11): pI-Phe
  MOD_RES (13)..(13): D-Trp
ERPRASHKGPFPW

SEQ ID NO: 181 - protein, 13 aa, Artificial Sequence
  source: /note="Description of Artificial Sequence: Synthetic peptide"
  MOD_RES (1)..(1): PyroGlu
  MOD_RES (4)..(4): hArg
  MOD_RES (5)..(5): Cha
  MOD_RES (11)..(11): Nle
  MOD_RES (13)..(13): D-Trp
ERPRASHKGPLPW

SEQ ID NO: 182 - protein, 13 aa, Artificial Sequence
  source: /note="Description of Artificial Sequence: Synthetic peptide"
  MOD_RES (1)..(1): PyroGlu
  MOD_RES (4)..(4): hArg
  MOD_RES (5)..(5): Cha
  MOD_RES (11)..(11): Nle
ERPRASHKGPLPY

SEQ ID NO: 183 - protein, 13 aa, Artificial Sequence
  source: /note="Description of Artificial Sequence: Synthetic peptide"
  MOD_RES (1)..(1): PyroGlu
  MOD_RES (4)..(4): hArg
  MOD_RES (5)..(5): NMeLeu
  MOD_RES (11)..(11): Nle
  MOD_RES (13)..(13): D-Tyr
ERPRLSHKGPLPY

SEQ ID NO: 184 - protein, 13 aa, Artificial Sequence
  source: /note="Description of Artificial Sequence: Synthetic peptide"
  MOD_RES (1)..(1): PyroGlu
  MOD_RES (4)..(4): hArg
  MOD_RES (5)..(5): NMeLeu
  MOD_RES (11)..(11): pI-Phe
  MOD_RES (13)..(13): D-Tyr
ERPRLSHKGPFPY

SEQ ID NO: 185 - protein, 13 aa, Artificial Sequence
  source: /note="Description of Artificial Sequence: Synthetic peptide"
  MOD_RES (1)..(1): PyroGlu
  MOD_RES (4)..(4): hArg
  MOD_RES (5)..(5): Cha
  MOD_RES (11)..(11): pI-Phe
  MOD_RES (13)..(13): D-Tyr
ERPRASHKGPFPY

SEQ ID NO: 186 - protein, 13 aa, Artificial Sequence
  source: /note="Description of Artificial Sequence: Synthetic peptide"
  MOD_RES (1)..(1): PyroGlu
  MOD_RES (4)..(4): hArg
  MOD_RES (5)..(5): Cha
  MOD_RES (11)..(11): Nle
  MOD_RES (13)..(13): D-Tyr
ERPRASHKGPLPY

SEQ ID NO: 187 - protein, 13 aa, Artificial Sequence
  source: /note="Description of Artificial Sequence: Synthetic peptide"
  MOD_RES (1)..(1): PyroGlu
  MOD_RES (4)..(4): hArg
  MOD_RES (5)..(5): NMeLeu
  MOD_RES (11)..(11): pI-Phe
  MOD_RES (13)..(13): 2-Nal
ERPRLFHKGPFPA

SEQ ID NO: 188 - protein, 13 aa, Artificial Sequence
  source: /note="Description of Artificial Sequence: Synthetic peptide"
  MOD_RES (1)..(1): PyroGlu
  MOD_RES (4)..(4): hArg
  MOD_RES (5)..(5): NMeLeu
  MOD_RES (11)..(11): Nle
  MOD_RES (13)..(13): D-Bip
  source: /note="C-term Amide"
ERPRLFHKGPLPF

SEQ ID NO: 189 - protein, 13 aa, Artificial Sequence
  source: /note="Description of Artificial Sequence: Synthetic peptide"
  MOD_RES (1)..(1): PyroGlu
  MOD_RES (4)..(4): hArg
  MOD_RES (5)..(5): NMeLeu
  MOD_RES (11)..(11): Nle
  MOD_RES (13)..(13): D-Bip
ERPRLFHKGPLPF

SEQ ID NO: 190 - protein, 13 aa, Artificial Sequence
  source: /note="Description of Artificial Sequence: Synthetic peptide"
  MOD_RES (1)..(1): PyroGlu
  MOD_RES (4)..(4): hArg
  MOD_RES (5)..(5): NMeLeu
  MOD_RES (11)..(11): pI-Phe
  MOD_RES (13)..(13): D-Bip
ERPRLFHKGPFPF

SEQ ID NO: 191 - protein, 13 aa, Artificial Sequence
  source: /note="Description of Artificial Sequence: Synthetic peptide"
  source: /note="N-term Palmitoyl"
  MOD_RES (4)..(4): hArg
  MOD_RES (5)..(5): NMeLeu
  MOD_RES (11)..(11): Nle
  MOD_RES (13)..(13): D-Bip
LRPRLFHKGPLPF

SEQ ID NO: 192 - protein, 13 aa, Artificial Sequence
  source: /note="Description of Artificial Sequence: Synthetic peptide"
  MOD_RES (1)..(1): PyroGlu
  MOD_RES (4)..(4): hArg
  MOD_RES (5)..(5): Cha
  MOD_RES (11)..(11): pI-Phe
  MOD_RES (13)..(13): D-Bip
ERPRASHKGPFPF

SEQ ID NO: 193 - protein, 13 aa, Artificial Sequence
  source: /note="Description of Artificial Sequence: Synthetic peptide"
  MOD_RES (1)..(1): PyroGlu
  MOD_RES (4)..(4): hArg
  MOD_RES (5)..(5): NMeLeu
  MOD_RES (11)..(11): Nle
  MOD_RES (13)..(13): 4-Me-F
ERPRLSHKGPLPF

SEQ ID NO: 194 - protein, 13 aa, Artificial Sequence
  source: /note="Description of Artificial Sequence: Synthetic peptide"
  MOD_RES (1)..(1): PyroGlu
  MOD_RES (4)..(4): hArg
  MOD_RES (5)..(5): NMeLeu
  MOD_RES (11)..(11): pI-Phe
  MOD_RES (13)..(13): D-Bip
  source: /note="C-term Amide"
ERPRLFHKGPFPF

SEQ ID NO: 195 - protein, 13 aa, Artificial Sequence
  source: /note="Description of Artificial Sequence: Synthetic peptide"
  MOD_RES (1)..(1): PyroGlu
  MOD_RES (4)..(4): hArg
  MOD_RES (5)..(5): Cha
  MOD_RES (11)..(11): Nle
  MOD_RES (13)..(13): D-Phe
  source: /note="C-term Amide"
ERPRASHKGPLPF

SEQ ID NO: 196 - protein, 13 aa, Artificial Sequence
  source: /note="Description of Artificial Sequence: Synthetic peptide"
  MOD_RES (1)..(1): PyroGlu
  MOD_RES (5)..(5): Cha
  MOD_RES (11)..(11): Nle
  MOD_RES (12)..(12): 1-Nal
ERPRAFHKGPLAF

SEQ ID NO: 197 - protein, 13 aa, Artificial Sequence
  source: /note="Description of Artificial Sequence: Synthetic peptide"
  MOD_RES (1)..(1): PyroGlu
  MOD_RES (11)..(11): Nle
  MOD_RES (12)..(12): 1-Nal
ERPRLFHKGPLAF

SEQ ID NO: 198 - protein, 13 aa, Artificial Sequence
  source: /note="Description of Artificial Sequence: Synthetic peptide"
  MOD_RES (1)..(1): PyroGlu
  MOD_RES (4)..(4): hArg
  MOD_RES (5)..(5): Cha
  MOD_RES (11)..(11): Nle
  MOD_RES (12)..(12): 1-Nal
ERPRAFHKGPLAF

SEQ ID NO: 199 - protein, 13 aa, Artificial Sequence
  source: /note="Description of Artificial Sequence: Synthetic peptide"
  MOD_RES (1)..(1): PyroGlu
  MOD_RES (4)..(4): hArg
  MOD_RES (11)..(11): Nle
  MOD_RES (12)..(12): 1-Nal
ERPRLFHKGPLAF

SEQ ID NO: 200 - protein, 13 aa, Artificial Sequence
  source: /note="Description of Artificial Sequence: Synthetic peptide"
  MOD_RES (1)..(1): PyroGlu
  MOD_RES (4)..(4): hArg
  MOD_RES (5)..(5): NMeLeu
  MOD_RES (11)..(11): Nle
  MOD_RES (13)..(13): 4-Cl-F
  source: /note="C-term Amide"
ERPRLSHKGPLPF

SEQ ID NO: 201 - protein, 13 aa, Artificial Sequence
  source: /note="Description of Artificial Sequence: Synthetic peptide"
  MOD_RES (1)..(1): PyroGlu
  MOD_RES (4)..(4): hArg
  MOD_RES (5)..(5): NMeLeu
  MOD_RES (11)..(11): Nle
  MOD_RES (13)..(13): 4-Me-F
  source: /note="C-term Amide"
ERPRLSHKGPLPF

SEQ ID NO: 202 - protein, 13 aa, Artificial Sequence
  source: /note="Description of Artificial Sequence: Synthetic peptide"
  MOD_RES (1)..(1): PyroGlu
  MOD_RES (4)..(4): hArg
  MOD_RES (5)..(5): NMeLeu
  MOD_RES (11)..(11): Nle
  MOD_RES (13)..(13): Bip
  source: /note="C-term Amide"
ERPRLSHKGPLPF

SEQ ID NO: 203 - protein, 13 aa, Artificial Sequence
  source: /note="Description of Artificial Sequence: Synthetic peptide"
  MOD_RES (1)..(1): PyroGlu
  MOD_RES (4)..(4): hArg
  MOD_RES (5)..(5): NMeLeu
  MOD_RES (11)..(11): Nle
  MOD_RES (13)..(13): D-Bip
  source: /note="C-term Amide"
ERPRLSHKGPLPF

SEQ ID NO: 204 - protein, 13 aa, Artificial Sequence
  source: /note="Description of Artificial Sequence: Synthetic peptide"
  MOD_RES (1)..(1): PyroGlu
  MOD_RES (4)..(4): hArg
  MOD_RES (5)..(5): NMeLeu
  MOD_RES (11)..(11): Nle
  MOD_RES (13)..(13): 4-NO2-F
  source: /note="C-term Amide"
ERPRLSHKGPLPF

SEQ ID NO: 205 - protein, 13 aa, Artificial Sequence
  source: /note="Description of Artificial Sequence: Synthetic peptide"
  MOD_RES (1)..(1): PyroGlu
  MOD_RES (4)..(4): hArg
  MOD_RES (5)..(5): NMeLeu
  MOD_RES (10)..(10): 1-Nal
  MOD_RES (11)..(11): Nle
  MOD_RES (13)..(13): 4-Cl-F
  source: /note="C-term Amide"
ERPRLSHKGALPF

SEQ ID NO: 206 - protein, 13 aa, Artificial Sequence
  source: /note="Description of Artificial Sequence: Synthetic peptide"
  MOD_RES (1)..(1): PyroGlu
  MOD_RES (4)..(4): hArg
  MOD_RES (5)..(5): NMeLeu
  MOD_RES (10)..(10): 1-Nal
  MOD_RES (11)..(11): Nle
  MOD_RES (13)..(13): 4-Cl-F
  source: /note="C-term Amide"
ERPRLFHKGALPF

SEQ ID NO: 207 - protein, 13 aa, Artificial Sequence
  source: /note="Description of Artificial Sequence: Synthetic peptide"
  MOD_RES (1)..(1): PyroGlu
  MOD_RES (4)..(4): hArg
  MOD_RES (5)..(5): NMeLeu
  MOD_RES (11)..(11): Nle
  MOD_RES (13)..(13): 4-Cl-F
  source: /note="C-term Amide"
ERPRLFHKGPLPF

SEQ ID NO: 208 - protein, 13 aa, Artificial Sequence
  source: /note="Description of Artificial Sequence: Synthetic peptide"
  MOD_RES (1)..(1): PyroGlu
  MOD_RES (4)..(4): hArg
  MOD_RES (5)..(5): NMeLeu
  MOD_RES (10)..(10): 1-Nal
  MOD_RES (11)..(11): Nle
  MOD_RES (13)..(13): 4-Cl-F
  source: /note="C-term Amide"
ERPRLSAKGALPF

SEQ ID NO: 209 - protein, 13 aa, Artificial Sequence
  source: /note="Description of Artificial Sequence: Synthetic peptide"
  MOD_RES (1)..(1): PyroGlu
  MOD_RES (4)..(4): hArg
  MOD_RES (5)..(5): NMeLeu
  MOD_RES (10)..(10): 1-Nal
  MOD_RES (11)..(11): Nle
  MOD_RES (13)..(13): 4-Cl-F
  source: /note="C-term Amide"
ERPRLFAKGALPF

SEQ ID NO: 210 - protein, 13 aa, Artificial Sequence
  source: /note="Description of Artificial Sequence: Synthetic peptide"
  MOD_RES (1)..(1): PyroGlu
  MOD_RES (4)..(4): hArg
  MOD_RES (5)..(5): NMeLeu
  MOD_RES (11)..(11): Nle
  MOD_RES (13)..(13): 4-Cl-F
  source: /note="C-term Amide"
ERPRLFAKGPLPF

SEQ ID NO: 211 - protein, 13 aa, Artificial Sequence
  source: /note="Description of Artificial Sequence: Synthetic peptide"
  MOD_RES (1)..(1): PyroGlu
  MOD_RES (4)..(4): hArg
  MOD_RES (5)..(5): NMeLeu
  MOD_RES (7)..(7): 1-Nal
  MOD_RES (10)..(10): 1-Nal
  MOD_RES (11)..(11): Nle
  MOD_RES (13)..(13): 4-Cl-F
  source: /note="C-term Amide"
ERPRLSAKGALPF

SEQ ID NO: 212 - protein, 13 aa, Artificial Sequence
  source: /note="Description of Artificial Sequence: Synthetic peptide"
  MOD_RES (1)..(1): PyroGlu
  MOD_RES (4)..(4): hArg
  MOD_RES (5)..(5): NMeLeu
  MOD_RES (7)..(7): 1-Nal
  MOD_RES (10)..(10): 1-Nal
  MOD_RES (11)..(11): Nle
  MOD_RES (13)..(13): 4-Cl-F
  source: /note="C-term Amide"
ERPRLFAKGALPF

SEQ ID NO: 213 - protein, 13 aa, Artificial Sequence
  source: /note="Description of Artificial Sequence: Synthetic peptide"
  MOD_RES (1)..(1): PyroGlu
  MOD_RES (4)..(4): hArg
  MOD_RES (5)..(5): NMeLeu
  MOD_RES (7)..(7): 1-Nal
  MOD_RES (11)..(11): Nle
  MOD_RES (13)..(13): 4-Cl-F
  source: /note="C-term Amide"
ERPRLFAKGPLPF

SEQ ID NO: 214 - protein, 13 aa, Artificial Sequence
  source: /note="Description of Artificial Sequence: Synthetic peptide"
  MOD_RES (1)..(1): PyroGlu
  MOD_RES (4)..(4): hArg
  MOD_RES (5)..(5): NMeLeu
  MOD_RES (7)..(7): 1-Nal
  MOD_RES (11)..(11): Nle
  MOD_RES (13)..(13): 4-Cl-F
  source: /note="C-term Amide"
ERPRLFAKGPLPF

SEQ ID NO: 215 - protein, 13 aa, Artificial Sequence
  source: /note="Description of Artificial Sequence: Synthetic peptide"
  MOD_RES (1)..(1): PyroGlu
  MOD_RES (4)..(4): hArg
  MOD_RES (5)..(5): NMeLeu
  MOD_RES (6)..(6): NMePhe
  MOD_RES (7)..(7): 1-Nal
  MOD_RES (11)..(11): Nle
  MOD_RES (13)..(13): 4-Cl-F
  source: /note="C-term Amide"
ERPRLFAKGPLPF

SEQ ID NO: 216 - protein, 13 aa, Artificial Sequence
  source: /note="Description of Artificial Sequence: Synthetic peptide"
  MOD_RES (1)..(1): PyroGlu
  MOD_RES (4)..(4): hArg
  MOD_RES (5)..(5): NMeLeu
  MOD_RES (6)..(6): NMePhe
  MOD_RES (10)..(10): 1-Nal
  MOD_RES (11)..(11): Nle
  MOD_RES (13)..(13): 4-Cl-F
  source: /note="C-term Amide"
ERPRLFAKGALPF

SEQ ID NO: 217 - protein, 13 aa, Artificial Sequence
  source: /note="Description of Artificial Sequence: Synthetic peptide"
  MOD_RES (1)..(1): PyroGlu
  MOD_RES (4)..(4): hArg
  MOD_RES (5)..(5): NMeLeu
  MOD_RES (6)..(6): NMePhe
  MOD_RES (10)..(10): 1-Nal
  MOD_RES (11)..(11): Nle
  MOD_RES (13)..(13): 4-Cl-F
  source: /note="C-term Amide"
ERPRLFAKGALPF

SEQ ID NO: 218 - protein, 13 aa, Artificial Sequence
  source: /note="Description of Artificial Sequence: Synthetic peptide"
  MOD_RES (1)..(1): PyroGlu
  MOD_RES (4)..(4): hArg
  MOD_RES (5)..(5): NMeLeu
  MOD_RES (7)..(7): 2-Nal
  MOD_RES (10)..(10): 1-Nal
  MOD_RES (11)..(11): Nle
  MOD_RES (13)..(13): 4-Cl-F
  source: /note="C-term Amide"
ERPRLFAKGALPF

SEQ ID NO: 219 - protein, 13 aa, Artificial Sequence
  source: /note="Description of Artificial Sequence: Synthetic peptide"
  MOD_RES (1)..(1): PyroGlu
  MOD_RES (4)..(4): hArg
  MOD_RES (5)..(5): NMeLeu
  MOD_RES (7)..(7): 2-Nal
  MOD_RES (11)..(11): Nle
  MOD_RES (13)..(13): 4-Cl-F
  source: /note="C-term Amide"
ERPRLFAKGPLPF

SEQ ID NO: 220 - protein, 13 aa, Artificial Sequence
  source: /note="Description of Artificial Sequence: Synthetic peptide"
  MOD_RES (1)..(1): PyroGlu
  MOD_RES (4)..(4): hArg
  MOD_RES (5)..(5): NMeLeu
  MOD_RES (6)..(6): NMePhe
  MOD_RES (7)..(7): 2-Nal
  MOD_RES (11)..(11): Nle
  MOD_RES (13)..(13): 4-Cl-F
  source: /note="C-term Amide"
ERPRLFAKGPLPF

SEQ ID NO: 221 - protein, 13 aa, Artificial Sequence
  source: /note="Description of Artificial Sequence: Synthetic peptide"
  MOD_RES (1)..(1): PyroGlu
  MOD_RES (4)..(4): hArg
  MOD_RES (5)..(5): NMeLeu
  MOD_RES (11)..(11): Nle
  MOD_RES (13)..(13): D-Bip
ERPRLSHKGPLPF

SEQ ID NO: 222 - protein, 13 aa, Artificial Sequence
  source: /note="Description of Artificial Sequence: Synthetic peptide"
  MOD_RES (1)..(1): PyroGlu
  MOD_RES (4)..(4): hArg
  MOD_RES (5)..(5): NMeLeu
  MOD_RES (11)..(11): pI-Phe
  MOD_RES (13)..(13): D-Bip
ERPRLSHKGPFPF

SEQ ID NO: 223 - protein, 13 aa, Artificial Sequence
  source: /note="Description of Artificial Sequence: Synthetic peptide"
  MOD_RES (1)..(1): PyroGlu
  MOD_RES (4)..(4): hArg
  MOD_RES (5)..(5): NMeLeu
  MOD_RES (11)..(11): pI-Phe
  MOD_RES (13)..(13): 2-Nal
ERPRLSHKGPFPA

SEQ ID NO: 224 - protein, 13 aa, Artificial Sequence
  source: /note="Description of Artificial Sequence: Synthetic peptide"
  source: /note="N-term Palmitoyl"
  MOD_RES (4)..(4): hArg
  MOD_RES (5)..(5): NMeLeu
  MOD_RES (11)..(11): pI-Phe
  MOD_RES (13)..(13): D-Bip
LRPRLSHKGPFPF

SEQ ID NO: 225 - protein, 14 aa, Artificial Sequence
  source: /note="Description of Artificial Sequence: Synthetic peptide"
  MOD_RES (1)..(1): PyroGlu
  MOD_RES (4)..(4): hArg
  MOD_RES (5)..(5): NMeLeu
  MOD_RES (11)..(11): Nle
  MOD_RES (13)..(13): D-Bip
  source: /note="C-term Amide"
ERPRLSHKGPLPFK

SEQ ID NO: 226 - protein, 13 aa, Artificial Sequence
  source: /note="Description of Artificial Sequence: Synthetic peptide"
  MOD_RES (1)..(1): PyroGlu
  MOD_RES (4)..(4): hArg
  MOD_RES (5)..(5): NMeLeu
  MOD_RES (11)..(11): Nle
  MOD_RES (13)..(13): 2-Nal
ERPRLSHKGPLPA

SEQ ID NO: 227 - protein, 13 aa, Artificial Sequence
  source: /note="Description of Artificial Sequence: Synthetic peptide"
  MOD_RES (1)..(1): PyroGlu
  MOD_RES (4)..(4): hArg
  MOD_RES (5)..(5): NMeLeu
  MOD_RES (11)..(11): pI-Phe
  MOD_RES (13)..(13): 4-Cl-F
ERPRLSHKGPFPF

SEQ ID NO: 228 - protein, 13 aa, Artificial Sequence
  source: /note="Description of Artificial Sequence: Synthetic peptide"
  MOD_RES (1)..(1): PyroGlu
  MOD_RES (4)..(4): hArg
  MOD_RES (5)..(5): NMeLeu
  MOD_RES (11)..(11): Nle
  MOD_RES (13)..(13): 4-Cl-F
ERPRLSHKGPLPF

SEQ ID NO: 229 - protein, 13 aa, Artificial Sequence
  source: /note="Description of Artificial Sequence: Synthetic peptide"
  MOD_RES (1)..(1): PyroGlu
  MOD_RES (4)..(4): hArg
  MOD_RES (5)..(5): NMeLeu
  MOD_RES (11)..(11): Nle
  MOD_RES (13)..(13): 4-F-F
ERPRLSHKGPLPF

SEQ ID NO: 230 - protein, 13 aa, Artificial Sequence
  source: /note="Description of Artificial Sequence: Synthetic peptide"
  MOD_RES (1)..(1): PyroGlu
  MOD_RES (4)..(4): hArg
  MOD_RES (5)..(5): Cha
  MOD_RES (11)..(11): Nle
  MOD_RES (13)..(13): 4-F-F
ERPRASHKGPLPF

SEQ ID NO: 231 - protein, 13 aa, Artificial Sequence
  source: /note="Description of Artificial Sequence: Synthetic peptide"
  MOD_RES (1)..(1): PyroGlu
  MOD_RES (4)..(4): hArg
  MOD_RES (5)..(5): NMeLeu
  MOD_RES (11)..(11): Nle
  MOD_RES (13)..(13): pI-Phe
ERPRLSHKGPLPF

SEQ ID NO: 232 - protein, 13 aa, Artificial Sequence
  source: /note="Description of Artificial Sequence: Synthetic peptide"
  MOD_RES (1)..(1): PyroGlu
  MOD_RES (4)..(4): hArg
  MOD_RES (5)..(5): NMeLeu
  MOD_RES (11)..(11): Nle
  MOD_RES (13)..(13): D-Phe
ERPRLSHKGPLPF

SEQ ID NO: 233 - protein, 13 aa, Artificial Sequence
  source: /note="Description of Artificial Sequence: Synthetic peptide"
  source: /note="N-term Palmitoyl"
  MOD_RES (4)..(4): hArg
  MOD_RES (5)..(5): NMeLeu
  MOD_RES (11)..(11): pI-Phe
  MOD_RES (13)..(13): D-Bip
LRPRLSHKGPFPF

SEQ ID NO: 234 - protein, 14 aa, Artificial Sequence
  source: /note="Description of Artificial Sequence: Synthetic peptide"
  MOD_RES (1)..(1): PyroGlu
  MOD_RES (4)..(4): hArg
  MOD_RES (5)..(5): NMeLeu
  MOD_RES (11)..(11): Nle
  MOD_RES (13)..(13): D-Bip
  source: /note="C-term Amide"
ERPRLSHKGPLPFK

SEQ ID NO: 235 - protein, 13 aa, Artificial Sequence
  source: /note="Description of Artificial Sequence: Synthetic peptide"
  MOD_RES (1)..(1): PyroGlu
  MOD_RES (4)..(4): hArg
  MOD_RES (5)..(5): Cha
  MOD_RES (11)..(11): pI-Phe
  MOD_RES (13)..(13): 2-Nal
ERPRASHKGPFPA

SEQ ID NO: 236 - protein, 14 aa, Artificial Sequence
  source: /note="Description of Artificial Sequence: Synthetic peptide"
  source: /note="N-term Acetyl"
  MOD_RES (1)..(1): Pra
  MOD_RES (5)..(5): hArg
  MOD_RES (6)..(6): NMeLeu
  MOD_RES (7)..(7): Pra
  MOD_RES (12)..(12): Nle
  MOD_RES (14)..(14): 4-Cl-F
GLRPRLGHKGPLPF

SEQ ID NO: 237 - protein, 14 aa, Artificial Sequence
  source: /note="Description of Artificial Sequence: Synthetic peptide"
  source: /note="N-term Acetyl"
  MOD_RES (1)..(1): Pra
  MOD_RES (5)..(5): hArg
  MOD_RES (6)..(6): NMeLeu
  MOD_RES (7)..(7): Pra
  MOD_RES (12)..(12): Nle
  MOD_RES (14)..(14): 4-Cl-F
GLRPRLGHKGPLPF

SEQ ID NO: 238 - protein, 14 aa, Artificial Sequence
  source: /note="Description of Artificial Sequence: Synthetic peptide"
  source: /note="N-term Acetyl"
  MOD_RES (1)..(1): Pra
  MOD_RES (5)..(5): NMeArg
  MOD_RES (6)..(6): NMeLeu
  MOD_RES (7)..(7): Pra
  MOD_RES (12)..(12): Nle
  MOD_RES (14)..(14): 4-Cl-F
GLRPRLGHKGPLPF

SEQ ID NO: 239 - protein, 14 aa, Artificial Sequence
  source: /note="Description of Artificial Sequence: Synthetic peptide"
  source: /note="N-term Acetyl"
  MOD_RES (1)..(1): Pra
  MOD_RES (3)..(3): NMeArg
  MOD_RES (5)..(5): hArg
  MOD_RES (6)..(6): NMeLeu
  MOD_RES (7)..(7): Pra
  MOD_RES (12)..(12): Nle
  MOD_RES (14)..(14): 4-Cl-F
GLRPRLGHKGPLPF

SEQ ID NO: 240 - protein, 14 aa, Artificial Sequence
  source: /note="Description of Artificial Sequence: Synthetic peptide"
  source: /note="N-term Acetyl"
  MOD_RES (1)..(1): Pra
  MOD_RES (3)..(3): NMeArg
  MOD_RES (5)..(5): NMeArg
  MOD_RES (6)..(6): NMeLeu
  MOD_RES (7)..(7): Pra
  MOD_RES (12)..(12): Nle
  MOD_RES (14)..(14): 4-Cl-F
GLRPRLGHKGPLPF

SEQ ID NO: 241 - protein, 13 aa, Artificial Sequence
  source: /note="Description of Artificial Sequence: Synthetic peptide"
  MOD_RES (1)..(1): PyroGlu
  MOD_RES (4)..(4): hArg
  MOD_RES (5)..(5): NMeLeu
  MOD_RES (6)..(6): Pra
  MOD_RES (10)..(10): Oic
  MOD_RES (11)..(11): Nle
  MOD_RES (13)..(13): 4-Cl-F
ERPRLGHKGXLPF

SEQ ID NO: 242 - protein, 13 aa, Artificial Sequence
  source: /note="Description of Artificial Sequence: Synthetic peptide"
  MOD_RES (1)..(1): PyroGlu
  MOD_RES (4)..(4): hArg
  MOD_RES (5)..(5): NMeLeu
  MOD_RES (6)..(6): Pra
  MOD_RES (10)..(10): Oic
  MOD_RES (11)..(11): Nle
  MOD_RES (13)..(13): 4-Cl-F
ERPRLGHKGXLPF

SEQ ID NO: 243 - protein, 13 aa, Artificial Sequence
  source: /note="Description of Artificial Sequence: Synthetic peptide"
  MOD_RES (1)..(1): PyroGlu
  MOD_RES (4)..(4): NMeArg
  MOD_RES (5)..(5): NMeLeu
  MOD_RES (6)..(6): Pra
  MOD_RES (10)..(10): Oic
  MOD_RES (11)..(11): Nle
  MOD_RES (13)..(13): 4-Cl-F
ERPRLGHKGXLPF

SEQ ID NO: 244 - protein, 13 aa, Artificial Sequence
  source: /note="Description of Artificial Sequence: Synthetic peptide"
  MOD_RES (1)..(1): PyroGlu
  MOD_RES (2)..(2): NMeArg
  MOD_RES (4)..(4): hArg
  MOD_RES (5)..(5): NMeLeu
  MOD_RES (6)..(6): Pra
  MOD_RES (10)..(10): Oic
  MOD_RES (11)..(11): Nle
  MOD_RES (13)..(13): 4-Cl-F
ERPRLGHKGXLPF

SEQ ID NO: 245 - protein, 13 aa, Artificial Sequence
  source: /note="Description of Artificial Sequence: Synthetic peptide"
  MOD_RES (1)..(1): PyroGlu
  MOD_RES (2)..(2): NMeArg
  MOD_RES (4)..(4): NMeArg
  MOD_RES (5)..(5): NMeLeu
  MOD_RES (6)..(6): Pra
  MOD_RES (10)..(10): Oic
  MOD_RES (11)..(11): Nle
  MOD_RES (13)..(13): 4-Cl-F
ERPRLGHKGXLPF

SEQ ID NO: 246 - protein, 17 aa, Artificial Sequence
  source: /note="Description of Artificial Sequence: Synthetic peptide"
  MOD_RES (8)..(8): hArg
  MOD_RES (9)..(9): Cha
  MOD_RES (14)..(14): Oic
  MOD_RES (15)..(15): Nle
  MOD_RES (17)..(17): 4-Cl-F
KFRRQRPRASHKGXLPF

SEQ ID NO: 247 - protein, 17 aa, Artificial Sequence
  source: /note="Description of Artificial Sequence: Synthetic peptide"
  source: /note="N-term MeS-Propionyl"
  MOD_RES (8)..(8): hArg
  MOD_RES (9)..(9): Cha
  MOD_RES (14)..(14): Oic
  MOD_RES (15)..(15): Nle
  MOD_RES (17)..(17): 4-Cl-F
KFRRQRPRASHKGXLPF

SEQ ID NO: 248 - protein, 18 aa, Artificial Sequence
  source: /note="Description of Artificial Sequence: Synthetic peptide"
  MOD_RES (1)..(1): Pra
  MOD_RES (9)..(9): hArg
  MOD_RES (10)..(10): Cha
  MOD_RES (15)..(15): Oic
  MOD_RES (16)..(16): Nle
  MOD_RES (18)..(18): 4-Cl-F
GKFRRQRPRASHKGXLPF

SEQ ID NO: 249 - protein, 27 aa, Artificial Sequence
  source: /note="Description of Artificial Sequence: Synthetic peptide"
  MOD_RES (1)..(1): Pra
  MOD_RES (18)..(18): hArg
  MOD_RES (19)..(19): Cha
  MOD_RES (24)..(24): Oic
  MOD_RES (25)..(25): Nle
  MOD_RES (27)..(27): 4-Cl-F
GPGPWQGGRRKFRRQRPRASHKGXLPF

SEQ ID NO: 250 - protein, 37 aa, Artificial Sequence
  source: /note="Description of Artificial Sequence: Synthetic polypeptide"
  MOD_RES (1)..(1): Pra
  MOD_RES (28)..(28): hArg
  MOD_RES (29)..(29): Cha
  MOD_RES (34)..(34): Oic
  MOD_RES (35)..(35): Nle
  MOD_RES (37)..(37): 4-Cl-F
GLVQPRGSRNGPGPWQGGRRKFRRQRPRASHKGXLPF

SEQ ID NO: 251 - protein, 18 aa, Artificial Sequence
  source: /note="Description of Artificial Sequence: Synthetic peptide"
  MOD_RES (1)..(1): Pra
  MOD_RES (4)..(5): hArg
  MOD_RES (9)..(9): hArg
  MOD_RES (10)..(10): Cha
  MOD_RES (15)..(15): Oic
  MOD_RES (16)..(16): Nle
  MOD_RES (18)..(18): 4-Cl-F
GKFRRQRPRASHKGXLPF

SEQ ID NO: 252 - protein, 18 aa, Artificial Sequence
  source: /note="Description of Artificial Sequence: Synthetic peptide"
  MOD_RES (1)..(1): Pra
  MOD_RES (4)..(5): hArg
  MOD_RES (7)..(7): hArg
  MOD_RES (9)..(9): hArg
  MOD_RES (10)..(10): Cha
  MOD_RES (15)..(15): Oic
  MOD_RES (16)..(16): Nle
  MOD_RES (18)..(18): 4-Cl-F
GKFRRQRPRASHKGXLPF

SEQ ID NO: 253 - protein, 18 aa, Artificial Sequence
  source: /note="Description of Artificial Sequence: Synthetic peptide"
  MOD_RES (1)..(1): Pra
  MOD_RES (4)..(5): hArg
  MOD_RES (9)..(9): hArg
  MOD_RES (10)..(10): Cha
  MOD_RES (15)..(15): Oic
  MOD_RES (16)..(16): Nle
  MOD_RES (18)..(18): 4-Cl-F
GKFRRQQPRASHKGXLPF

SEQ ID NO: 254 - protein, 18 aa, Artificial Sequence
  source: /note="Description of Artificial Sequence: Synthetic peptide"
  MOD_RES (1)..(1): Pra
  MOD_RES (4)..(5): hArg
  MOD_RES (7)..(7): Cit
  MOD_RES (9)..(9): hArg
  MOD_RES (10)..(10): Cha
  MOD_RES (15)..(15): Oic
  MOD_RES (16)..(16): Nle
  MOD_RES (18)..(18): 4-Cl-F
GKFRRQXPRASHKGXLPF

SEQ ID NO: 255 - protein, 18 aa, Artificial Sequence
  source: /note="Description of Artificial Sequence: Synthetic peptide"
  MOD_RES (1)..(1): Pra
  MOD_RES (4)..(4): hArg
  MOD_RES (5)..(5): Cit
  MOD_RES (7)..(7): Cit
  MOD_RES (9)..(9): hArg
  MOD_RES (10)..(10): Cha
  MOD_RES (15)..(15): Oic
  MOD_RES (16)..(16): Nle
  MOD_RES (18)..(18): 4-Cl-F
GKFRXQXPRASHKGXLPF

SEQ ID NO: 256 - protein, 18 aa, Artificial Sequence
  source: /note="Description of Artificial Sequence: Synthetic peptide"
  MOD_RES (1)..(1): Pra
  MOD_RES (4)..(5): Cit
  MOD_RES (7)..(7): hArg
  MOD_RES (9)..(9): hArg
  MOD_RES (10)..(10): Cha
  MOD_RES (15)..(15): Oic
  MOD_RES (16)..(16): Nle
  MOD_RES (18)..(18): 4-Cl-F
GKFXXQRPRASHKGXLPF

SEQ ID NO: 257 - protein, 18 aa, Artificial Sequence
  source: /note="Description of Artificial Sequence: Synthetic peptide"
  MOD_RES (1)..(1): Pra
  MOD_RES (4)..(5): Cit
  MOD_RES (7)..(7): Cit
  MOD_RES (9)..(9): hArg
  MOD_RES (10)..(10): Cha
  MOD_RES (15)..(15): Oic
  MOD_RES (16)..(16): Nle
  MOD_RES (18)..(18): 4-Cl-F
GKFXXQXPRASHKGXLPF

SEQ ID NO: 258 - protein, 18 aa, Artificial Sequence
  source: /note="Description of Artificial Sequence: Synthetic peptide"
  MOD_RES (1)..(1): Pra
  MOD_RES (2)..(2): Orn
  MOD_RES (9)..(9): hArg
  MOD_RES (10)..(10): Cha
  MOD_RES (15)..(15): Oic
  MOD_RES (16)..(16): Nle
  MOD_RES (18)..(18): 4-Cl-F
GXFRRQRPRASHKGXLPF

SEQ ID NO: 259 - protein, 18 aa, Artificial Sequence
  source: /note="Description of Artificial Sequence: Synthetic peptide"
  MOD_RES (1)..(1): Pra
  MOD_RES (2)..(2): Orn
  MOD_RES (4)..(5): hArg
  MOD_RES (7)..(7): hArg
  MOD_RES (9)..(9): hArg
  MOD_RES (10)..(10): Cha
  MOD_RES (15)..(15): Oic
  MOD_RES (16)..(16): Nle
  MOD_RES (18)..(18): 4-Cl-F
GXFRRQRPRASHKGXLPF

SEQ ID NO: 260 - protein, 17 aa, Artificial Sequence
  source: /note="Description of Artificial Sequence: Synthetic peptide"
  MOD_RES (1)..(1): Pra
  MOD_RES (8)..(8): hArg
  MOD_RES (9)..(9): Cha
  MOD_RES (14)..(14): Oic
  MOD_RES (15)..(15): Nle
  MOD_RES (17)..(17): 4-Cl-F
GFRRQRPRASHKGXLPF

SEQ ID NO: 261 - protein, 13 aa, Artificial Sequence
  source: /note="Description of Artificial Sequence: Synthetic peptide"
  source: /note="N-term Bromoacetyl-NPEG11"
  MOD_RES (4)..(4): hArg
  MOD_RES (5)..(5): Cha
  MOD_RES (10)..(10): Oic
  MOD_RES (11)..(11): Nle
  MOD_RES (13)..(13): 4-Cl-F
LRPRASHKGXLPF

SEQ ID NO: 262 - protein, 17 aa, Artificial Sequence
  source: /note="Description of Artificial Sequence: Synthetic peptide"
  source: /note="N-term Bromoacetyl-NPEG11"
  MOD_RES (8)..(8): hArg
  MOD_RES (9)..(9): Cha
  MOD_RES (14)..(14): Oic
  MOD_RES (15)..(15): Nle
  MOD_RES (17)..(17): 4-Cl-F
KFRRQRPRASHKGXLPF

SEQ ID NO: 263 - protein, 17 aa, Artificial Sequence
  source: /note="Description of Artificial Sequence: Synthetic peptide"
  source: /note="N-term Mercaptopropionyl"
  MOD_RES (8)..(8): hArg
  MOD_RES (9)..(9): Cha
  MOD_RES (14)..(14): Oic
  MOD_RES (15)..(15): Nle
  MOD_RES (17)..(17): 4-Cl-F
KFRRQRPRASHKGXLPF

SEQ ID NO: 264 - protein, 16 aa, Artificial Sequence
  source: /note="Description of Artificial Sequence: Synthetic peptide"
  source: /note="N-term Mercaptopropionyl"
  MOD_RES (7)..(7): hArg
  MOD_RES (8)..(8): Cha
  MOD_RES (13)..(13): Oic
  MOD_RES (14)..(14): Nle
  MOD_RES (16)..(16): 4-Cl-F
FRRQRPRASHKGXLPF

SEQ ID NO: 265 - protein, 15 aa, Artificial Sequence
  source: /note="Description of Artificial Sequence: Synthetic peptide"
  source: /note="N-term Mercaptopropionyl"
  MOD_RES (6)..(6): hArg
  MOD_RES (7)..(7): Cha
  MOD_RES (12)..(12): Oic
  MOD_RES (13)..(13): Nle
  MOD_RES (15)..(15): 4-Cl-F
RRQRPRASHKGXLPF

SEQ ID NO: 266 - protein, 14 aa, Artificial Sequence
  source: /note="Description of Artificial Sequence: Synthetic peptide"
  source: /note="N-term Mercaptopropionyl"
  MOD_RES (5)..(5): hArg
  MOD_RES (6)..(6): Cha
  MOD_RES (11)..(11): Oic
  MOD_RES (12)..(12): Nle
  MOD_RES (14)..(14): 4-Cl-F
RQRPRASHKGXLPF

SEQ ID NO: 267 - protein, 13 aa, Artificial Sequence
  source: /note="Description of Artificial Sequence: Synthetic peptide"
  source: /note="N-term Mercaptopropionyl"
  MOD_RES (4)..(4): hArg
  MOD_RES (5)..(5): Cha
  MOD_RES (10)..(10): Oic
  MOD_RES (11)..(11): Nle
  MOD_RES (13)..(13): 4-Cl-F
QRPRASHKGXLPF

SEQ ID NO: 268 - protein, 13 aa, Artificial Sequence
  source: /note="Description of Artificial Sequence: Synthetic peptide"
  source: /note="N-term Mercaptopropionyl"
  MOD_RES (4)..(4): hArg
  MOD_RES (5)..(5): Cha
  MOD_RES (10)..(10): Oic
  MOD_RES (11)..(11): Nle
  MOD_RES (13)..(13): 4-Cl-F
LRPRASHKGXLPF

SEQ ID NO: 269 - protein, 14 aa, Artificial Sequence
  source: /note="Description of Artificial Sequence: Synthetic peptide"
  source: /note="N-term Mercaptopropionyl"
  MOD_RES (5)..(5): hArg
  MOD_RES (6)..(6): Cha
  MOD_RES (11)..(11): Oic
  MOD_RES (12)..(12): Nle
  MOD_RES (14)..(14): 4-Cl-F
LLRPRASHKGXLPF

SEQ ID NO: 270 - protein, 14 aa, Artificial Sequence
  source: /note="Description of Artificial Sequence: Synthetic peptide"
  MOD_RES (1)..(1): Pra
  MOD_RES (5)..(5): hArg
  MOD_RES (6)..(6): Cha
  MOD_RES (11)..(11): Oic
  MOD_RES (12)..(12): Nle
  MOD_RES (14)..(14): 4-Cl-F
GLRPRASHKGXLPF

SEQ ID NO: 271 - protein, 13 aa, Artificial Sequence
  source: /note="Description of Artificial Sequence: Synthetic peptide"
  MOD_RES (1)..(1): PyroGlu
  MOD_RES (4)..(4): hArg
  MOD_RES (5)..(5): Cha
  MOD_RES (6)..(6): Pra
  MOD_RES (10)..(10): Oic
  MOD_RES (11)..(11): Nle
  MOD_RES (13)..(13): 4-Cl-F
ERPRAGHKGXLPF

SEQ ID NO: 272 - protein, 13 aa, Artificial Sequence
  source: /note="Description of Artificial Sequence: Synthetic peptide"
  MOD_RES (1)..(1): PyroGlu
  MOD_RES (4)..(4): hArg
  MOD_RES (5)..(5): Cha
  MOD_RES (7)..(7): Pra
  MOD_RES (10)..(10): Oic
  MOD_RES (11)..(11): Nle
  MOD_RES (13)..(13): 4-Cl-F
ERPRASGKGXLPF

SEQ ID NO: 273 - protein, 17 aa, Artificial Sequence
  source: /note="Description of Artificial Sequence: Synthetic peptide"
  source: /note="N-term MeS-Propionyl"
  MOD_RES (8)..(8): hArg
  MOD_RES (9)..(9): Cha
  MOD_RES (14)..(14): Oic
  MOD_RES (15)..(15): Nle
  MOD_RES (17)..(17): 4-Cl-F
KFRRLRPRASHKGXLPF

SEQ ID NO: 274 - protein, 17 aa, Artificial Sequence
  source: /note="Description of Artificial Sequence: Synthetic peptide"
  source: /note="N-term MeS-Propionyl"
  MOD_RES (8)..(8): hArg
  MOD_RES (9)..(9): Cha
  MOD_RES (14)..(14): Oic
  MOD_RES (15)..(15): Nle
  MOD_RES (17)..(17): 4-Cl-F
KFRRARPRASHKGXLPF

SEQ ID NO: 275 - protein, 17 aa, Artificial Sequence
  source: /note="Description of Artificial Sequence: Synthetic peptide"
  source: /note="N-term MeS-Propionyl"
  MOD_RES (8)..(8): hArg
  MOD_RES (9)..(9): Cha
  MOD_RES (14)..(14): Oic
  MOD_RES (15)..(15): Nle
  MOD_RES (17)..(17): 4-Cl-F
KFRRVRPRASHKGXLPF

SEQ ID NO: 276 - protein, 17 aa, Artificial Sequence
  source: /note="Description of Artificial Sequence: Synthetic peptide"
  source: /note="N-term MeS-Propionyl"
  MOD_RES (8)..(8): hArg
  MOD_RES (9)..(9): Cha
  MOD_RES (14)..(14): Oic
  MOD_RES (15)..(15): Nle
  MOD_RES (17)..(17): 4-Cl-F
KFRRIRPRASHKGXLPF

SEQ ID NO: 277 - protein, 17 aa, Artificial Sequence
  source: /note="Description of Artificial Sequence: Synthetic peptide"
  source: /note="N-term MeS-Propionyl"
  MOD_RES (8)..(8): hArg
  MOD_RES (9)..(9): Cha
  MOD_RES (14)..(14): Oic
  MOD_RES (15)..(15): Nle
  MOD_RES (17)..(17): 4-Cl-F
KFRRFRPRASHKGXLPF

SEQ ID NO: 278 - protein, 17 aa, Artificial Sequence
  source: /note="Description of Artificial Sequence: Synthetic peptide"
  source: /note="N-term MeS-Propionyl"
  MOD_RES (8)..(8): hArg
  MOD_RES (9)..(9): Cha
  MOD_RES (14)..(14): Oic
  MOD_RES (15)..(15): Nle
  MOD_RES (17)..(17): 4-Cl-F
KFRRYRPRASHKGXLPF

SEQ ID NO: 279 - protein, 17 aa, Artificial Sequence
  source: /note="Description of Artificial Sequence: Synthetic peptide"
  source: /note="N-term MeS-Propionyl"
  MOD_RES (6)..(6): hArg
  MOD_RES (8)..(8): hArg
  MOD_RES (9)..(9): Cha
  MOD_RES (14)..(14): Oic
  MOD_RES (15)..(15): Nle
  MOD_RES (17)..(17): 4-Cl-F
KFRRLRPRASHKGXLPF

SEQ ID NO: 280 - protein, 17 aa, Artificial Sequence
  source: /note="Description of Artificial Sequence: Synthetic peptide"
  source: /note="N-term MeS-Propionyl"
  MOD_RES (8)..(8): hArg
  MOD_RES (9)..(9): Cha
  MOD_RES (14)..(14): Oic
  MOD_RES (15)..(15): Nle
  MOD_RES (17)..(17): 4-Cl-F
KFRKLRPRASHKGXLPF

SEQ ID NO: 281 - protein, 17 aa, Artificial Sequence
  source: /note="Description of Artificial Sequence: Synthetic peptide"
  source: /note="N-term MeS-Propionyl"
  MOD_RES (4)..(4): Orn
  MOD_RES (8)..(8): hArg
  MOD_RES (9)..(9): Cha
  MOD_RES (14)..(14): Oic
  MOD_RES (15)..(15): Nle
  MOD_RES (17)..(17): 4-Cl-F
KFRXLRPRASHKGXLPF

SEQ ID NO: 282 - protein, 17 aa, Artificial Sequence
  source: /note="Description of Artificial Sequence: Synthetic peptide"
  source: /note="N-term MeS-Propionyl"
  MOD_RES (8)..(8): hArg
  MOD_RES (9)..(9): Cha
  MOD_RES (14)..(14): Oic
  MOD_RES (15)..(15): Nle
  MOD_RES (17)..(17): 4-Cl-F
KFRHLRPRASHKGXLPF

SEQ ID NO: 283 - protein, 17 aa, Artificial Sequence
  source: /note="Description of Artificial Sequence: Synthetic peptide"
  source: /note="N-term MeS-Propionyl"
  MOD_RES (8)..(8): hArg
  MOD_RES (9)..(9): Cha
  MOD_RES (14)..(14): Oic
  MOD_RES (15)..(15): Nle
  MOD_RES (17)..(17): 4-Cl-F
KFRWLRPRASHKGXLPF

SEQ ID NO: 284 - protein, 17 aa, Artificial Sequence
  source: /note="Description of Artificial Sequence: Synthetic peptide"
  source: /note="N-term MeS-Propionyl"
  MOD_RES (8)..(8): hArg
  MOD_RES (9)..(9): Cha
  MOD_RES (14)..(14): Oic
  MOD_RES (15)..(15): Nle
  MOD_RES (17)..(17): 4-Cl-F
KFRFLRPRASHKGXLPF

SEQ ID NO: 285 - protein, 17 aa, Artificial Sequence
  source: /note="Description of Artificial Sequence: Synthetic peptide"
  source: /note="N-term MeS-Propionyl"
  MOD_RES (8)..(8): hArg
  MOD_RES (9)..(9): Cha
  MOD_RES (14)..(14): Oic
  MOD_RES (15)..(15): Nle
  MOD_RES (17)..(17): 4-Cl-F
KFRYLRPRASHKGXLPF

SEQ ID NO: 286 - protein, 17 aa, Artificial Sequence
  source: /note="Description of Artificial Sequence: Synthetic peptide"
  source: /note="N-term MeS-Propionyl"
  MOD_RES (4)..(4): 3Pal
  MOD_RES (8)..(8): hArg
  MOD_RES (9)..(9): Cha
  MOD_RES (14)..(14): Oic
  MOD_RES (15)..(15): Nle
  MOD_RES (17)..(17): 4-Cl-F
KFRALRPRASHKGXLPF

SEQ ID NO: 287 - protein, 17 aa, Artificial Sequence
  source: /note="Description of Artificial Sequence: Synthetic peptide"
  source: /note="N-term MeS-Propionyl"
  MOD_RES (4)..(4): 2Pal
  MOD_RES (8)..(8): hArg
  MOD_RES (9)..(9): Cha
  MOD_RES (14)..(14): Oic
  MOD_RES (15)..(15): Nle
  MOD_RES (17)..(17): 4-Cl-F
KFRALRPRASHKGXLPF

SEQ ID NO: 288 - protein, 17 aa, Artificial Sequence
  source: /note="Description of Artificial Sequence: Synthetic peptide"
  source: /note="N-term MeS-Propionyl"
  MOD_RES (8)..(8): hArg
  MOD_RES (9)..(9): Cha
  MOD_RES (14)..(14): Oic
  MOD_RES (15)..(15): Nle
  MOD_RES (17)..(17): 4-Cl-F
KFHRLRPRASHKGXLPF

SEQ ID NO: 289 - protein, 17 aa, Artificial Sequence
  source: /note="Description of Artificial Sequence: Synthetic peptide"
  source: /note="N-term MeS-Propionyl"
  MOD_RES (8)..(8): hArg
  MOD_RES (9)..(9): Cha
  MOD_RES (14)..(14): Oic
  MOD_RES (15)..(15): Nle
  MOD_RES (17)..(17): 4-Cl-F
KFWRLRPRASHKGXLPF

SEQ ID NO: 290 - protein, 17 aa, Artificial Sequence
  source: /note="Description of Artificial Sequence: Synthetic peptide"
  source: /note="N-term MeS-Propionyl"
  MOD_RES (8)..(8): hArg
  MOD_RES (9)..(9): Cha
  MOD_RES (14)..(14): Oic
  MOD_RES (15)..(15): Nle
  MOD_RES (17)..(17): 4-Cl-F
KFFRLRPRASHKGXLPF

SEQ ID NO: 291 - protein, 17 aa, Artificial Sequence
  source: /note="Description of Artificial Sequence: Synthetic peptide"
  source: /note="N-term MeS-Propionyl"
  MOD_RES (8)..(8): hArg
  MOD_RES (9)..(9): Cha
  MOD_RES (14)..(14): Oic
  MOD_RES (15)..(15): Nle
  MOD_RES (17)..(17): 4-Cl-F
KFYRLRPRASHKGXLPF

SEQ ID NO: 292 - protein, 17 aa, Artificial Sequence
  source: /note="Description of Artificial Sequence: Synthetic peptide"
  source: /note="N-term MeS-Propionyl"
  MOD_RES (3)..(3): 3Pal
  MOD_RES (8)..(8): hArg
  MOD_RES (9)..(9): Cha
  MOD_RES (14)..(14): Oic
  MOD_RES (15)..(15): Nle
  MOD_RES (17)..(17): 4-Cl-F
KFARLRPRASHKGXLPF

SEQ ID NO: 293 - protein, 17 aa, Artificial Sequence
  source: /note="Description of Artificial Sequence: Synthetic peptide"
  source: /note="N-term MeS-Propionyl"
  MOD_RES (3)..(3): 2Pal
  MOD_RES (8)..(8): hArg
  MOD_RES (9)..(9): Cha
  MOD_RES (14)..(14): Oic
  MOD_RES (15)..(15): Nle
  MOD_RES (17)..(17): 4-Cl-F
KFARLRPRASHKGXLPF

SEQ ID NO: 294 - protein, 16 aa, Artificial Sequence
  source: /note="Description of Artificial Sequence: Synthetic peptide"
  source: /note="N-term MeS-Propionyl"
  MOD_RES (7)..(7): hArg
  MOD_RES (8)..(8): Cha
  MOD_RES (13)..(13): Oic
  MOD_RES (14)..(14): Nle
  MOD_RES (16)..(16): 4-Cl-F
FRKLRPRASHKGXLPF

SEQ ID NO: 295 - protein, 16 aa, Artificial Sequence
  source: /note="Description of Artificial Sequence: Synthetic peptide"
  source: /note="N-term MeS-Propionyl"
  MOD_RES (3)..(3): Orn
  MOD_RES (7)..(7): hArg
  MOD_RES (8)..(8): Cha
  MOD_RES (13)..(13): Oic
  MOD_RES (14)..(14): Nle
  MOD_RES (16)..(16): 4-Cl-F
FRXLRPRASHKGXLPF

SEQ ID NO: 296 - protein, 16 aa, Artificial Sequence
  source: /note="Description of Artificial Sequence: Synthetic peptide"
  source: /note="N-term MeS-Propionyl"
  MOD_RES (7)..(7): hArg
  MOD_RES (8)..(8): Cha
  MOD_RES (13)..(13): Oic
  MOD_RES (14)..(14): Nle
  MOD_RES (16)..(16): 4-Cl-F
FRHLRPRASHKGXLPF

SEQ ID NO: 297 - protein, 16 aa, Artificial Sequence
  source: /note="Description of Artificial Sequence: Synthetic peptide"
  source: /note="N-term MeS-Propionyl"
  MOD_RES (7)..(7): hArg
  MOD_RES (8)..(8): Cha
  MOD_RES (13)..(13): Oic
  MOD_RES (14)..(14): Nle
  MOD_RES (16)..(16): 4-Cl-F
FRWLRPRASHKGXLPF

SEQ ID NO: 298 - protein, 16 aa, Artificial Sequence
  source: /note="Description of Artificial Sequence: Synthetic peptide"
  source: /note="N-term MeS-Propionyl"
  MOD_RES (7)..(7): hArg
  MOD_RES (8)..(8): Cha
  MOD_RES (13)..(13): Oic
  MOD_RES (14)..(14): Nle
  MOD_RES (16)..(16): 4-Cl-F
FRFLRPRASHKGXLPF

SEQ ID NO: 299 - protein, 16 aa, Artificial Sequence
  source: /note="Description of Artificial Sequence: Synthetic peptide"
  source: /note="N-term MeS-Propionyl"
  MOD_RES (7)..(7): hArg
  MOD_RES (8)..(8): Cha
  MOD_RES (13)..(13): Oic
  MOD_RES (14)..(14): Nle
  MOD_RES (16)..(16): 4-Cl-F
FRYLRPRASHKGXLPF

SEQ ID NO: 300 - protein, 16 aa, Artificial Sequence
  source: /note="Description of Artificial Sequence: Synthetic peptide"
  source: /note="N-term MeS-Propionyl"
  MOD_RES (7)..(7): hArg
  MOD_RES (8)..(8): Cha
  MOD_RES (13)..(13): Oic
  MOD_RES (14)..(14): Nle
  MOD_RES (16)..(16): 4-Cl-F
FKRLRPRASHKGXLPF

SEQ ID NO: 301 - protein, 16 aa, Artificial Sequence
  source: /note="Description of Artificial Sequence: Synthetic peptide"
  source: /note="N-term MeS-Propionyl"
  MOD_RES (2)..(2): Orn
  MOD_RES (7)..(7): hArg
  MOD_RES (8)..(8): Cha
  MOD_RES (13)..(13): Oic
  MOD_RES (14)..(14): Nle
  MOD_RES (16)..(16): 4-Cl-F
FXRLRPRASHKGXLPF

SEQ ID NO: 302 - protein, 16 aa, Artificial Sequence
  source: /note="Description of Artificial Sequence: Synthetic peptide"
  source: /note="N-term MeS-Propionyl"
  MOD_RES (7)..(7): hArg
  MOD_RES (8)..(8): Cha
  MOD_RES (13)..(13): Oic
  MOD_RES (14)..(14): Nle
  MOD_RES (16)..(16): 4-Cl-F
FHRLRPRASHKGXLPF

SEQ ID NO: 303 - protein, 16 aa, Artificial Sequence
  source: /note="Description of Artificial Sequence: Synthetic peptide"
  source: /note="N-term MeS-Propionyl"
  MOD_RES (7)..(7): hArg
  MOD_RES (8)..(8): Cha
  MOD_RES (13)..(13): Oic
  MOD_RES (14)..(14): Nle
  MOD_RES (16)..(16): 4-Cl-F
FWRLRPRASHKGXLPF

SEQ ID NO: 304 - protein, 16 aa, Artificial Sequence
  source: /note="Description of Artificial Sequence: Synthetic peptide"
  source: /note="N-term MeS-Propionyl"
  MOD_RES (7)..(7): hArg
  MOD_RES (8)..(8): Cha
  MOD_RES (13)..(13): Oic
  MOD_RES (14)..(14): Nle
  MOD_RES (16)..(16): 4-Cl-F
FFRLRPRASHKGXLPF

SEQ ID NO: 305 - protein, 16 aa, Artificial Sequence
  source: /note="Description of Artificial Sequence: Synthetic peptide"
  source: /note="N-term MeS-Propionyl"
  MOD_RES (7)..(7): hArg
  MOD_RES (8)..(8): Cha
  MOD_RES (13)..(13): Oic
  MOD_RES (14)..(14): Nle
  MOD_RES (16)..(16): 4-Cl-F
FYRLRPRASHKGXLPF

SEQ ID NO: 306 - protein, 16 aa, Artificial Sequence
  source: /note="Description of Artificial Sequence: Synthetic peptide"
  source: /note="N-term MeS-Propionyl"
  MOD_RES (2)..(2): 3Pal
  MOD_RES (7)..(7): hArg
  MOD_RES (8)..(8): Cha
  MOD_RES (13)..(13): Oic
  MOD_RES (14)..(14): Nle
  MOD_RES (16)..(16): 4-Cl-F
FARLRPRASHKGXLPF

SEQ ID NO: 307 - protein, 16 aa, Artificial Sequence
  source: /note="Description of Artificial Sequence: Synthetic peptide"
  source: /note="N-term MeS-Propionyl"
  MOD_RES (2)..(2): 2Pal
  MOD_RES (7)..(7): hArg
  MOD_RES (8)..(8): Cha
  MOD_RES (13)..(13): Oic
  MOD_RES (14)..(14): Nle
  MOD_RES (16)..(16): 4-Cl-F
FARLRPRASHKGXLPF

SEQ ID NO: 308 - protein, 17 aa, Artificial Sequence
  source: /note="Description of Artificial Sequence: Synthetic peptide"
  source: /note="N-term MeS-Propionyl"
  MOD_RES (6)..(6): hArg
  MOD_RES (8)..(8): hArg
  MOD_RES (9)..(9): Cha
  MOD_RES (14)..(14): Oic
  MOD_RES (15)..(15): Nle
  MOD_RES (17)..(17): 4-Cl-F
KFRRLRPRASHKGXLPF

SEQ ID NO: 309 - protein, 16 aa, Artificial Sequence
  source: /note="Description of Artificial Sequence: Synthetic peptide"
  source: /note="N-term MeS-Propionyl"
  MOD_RES (5)..(5): hArg
  MOD_RES (7)..(7): hArg
  MOD_RES (8)..(8): Cha
  MOD_RES (13)..(13): Oic
  MOD_RES (14)..(14): Nle
  MOD_RES (16)..(16): 4-Cl-F
FQQLRPRASHKGXLPF

SEQ ID NO: 310 - protein, 17 aa, Artificial Sequence
  source: /note="Description of Artificial Sequence: Synthetic peptide"
  source: /note="N-term MeS-Propionyl"
  MOD_RES (3)..(4): Cit
  MOD_RES (6)..(6): hArg
  MOD_RES (8)..(8): hArg
  MOD_RES (9)..(9): Cha
  MOD_RES (14)..(14): Oic
  MOD_RES (15)..(15): Nle
  MOD_RES (17)..(17): 4-Cl-F
KFXXLRPRASHKGXLPF

SEQ ID NO: 311 - protein, 16 aa, Artificial Sequence
  source: /note="Description of Artificial Sequence: Synthetic peptide"
  source: /note="N-term MeS-Propionyl"
  MOD_RES (2)..(3): Cit
  MOD_RES (5)..(5): hArg
  MOD_RES (7)..(7): hArg
  MOD_RES (8)..(8): Cha
  MOD_RES (13)..(13): Oic
  MOD_RES (14)..(14): Nle
  MOD_RES (16)..(16): 4-Cl-F
FXXLRPRASHKGXLPF

SEQ ID NO: 312 - protein, 17 aa, Artificial Sequence
  source: /note="Description of Artificial Sequence: Synthetic peptide"
  source: /note="N-term MeS-Propionyl"
  MOD_RES (6)..(6): hArg
  MOD_RES (8)..(8): hArg
  MOD_RES (9)..(9): Cha
  MOD_RES (14)..(14): Oic
  MOD_RES (15)..(15): Nle
  MOD_RES (17)..(17): 4-Cl-F
KFARLRPRASHKGXLPF

SEQ ID NO: 313 - protein, 17 aa, Artificial Sequence
  source: /note="Description of Artificial Sequence: Synthetic peptide"
  source: /note="N-term MeS-Propionyl"
  MOD_RES (6)..(6): hArg
  MOD_RES (8)..(8): hArg
  MOD_RES (9)..(9): Cha
  MOD_RES (14)..(14): Oic
  MOD_RES (15)..(15): Nle
  MOD_RES (17)..(17): 4-Cl-F
KFERLRPRASHKGXLPF

SEQ ID NO: 314 - protein, 17 aa, Artificial Sequence
  source: /note="Description of Artificial Sequence: Synthetic peptide"
  source: /note="N-term MeS-Propionyl"
  MOD_RES (6)..(6): hArg
  MOD_RES (8)..(8): hArg
  MOD_RES (9)..(9): Cha
  MOD_RES (14)..(14): Oic
  MOD_RES (15)..(15): Nle
  MOD_RES (17)..(17): 4-Cl-F
KFTRLRPRASHKGXLPF

SEQ ID NO: 315 - protein, 17 aa, Artificial Sequence
  source: /note="Description of Artificial Sequence: Synthetic peptide"
  source: /note="N-term MeS-Propionyl"
  MOD_RES (6)..(6): hArg
  MOD_RES (8)..(8): hArg
  MOD_RES (9)..(9): Cha
  MOD_RES (14)..(14): Oic
  MOD_RES (15)..(15): Nle
  MOD_RES (17)..(17): 4-Cl-F
KFYRLRPRASHKGXLPF

SEQ ID NO: 316 - protein, 17 aa, Artificial Sequence
  source: /note="Description of Artificial Sequence: Synthetic peptide"
  source: /note="N-term MeS-Propionyl"
  MOD_RES (6)..(6): hArg
  MOD_RES (8)..(8): hArg
  MOD_RES (9)..(9): Cha
  MOD_RES (14)..(14): Oic
  MOD_RES (15)..(15): Nle
  MOD_RES (17)..(17): 4-Cl-F
KFIRLRPRASHKGXLPF

SEQ ID NO: 317 - protein, 17 aa, Artificial Sequence
  source: /note="Description of Artificial Sequence: Synthetic peptide"
  source: /note="N-term MeS-Propionyl"
  MOD_RES (6)..(6): hArg
  MOD_RES (8)..(8): hArg
  MOD_RES (9)..(9): Cha
  MOD_RES (14)..(14): Oic
  MOD_RES (15)..(15): Nle
  MOD_RES (17)..(17): 4-Cl-F
KFPRLRPRASHKGXLPF

SEQ ID NO: 318 - protein, 17 aa, Artificial Sequence
  source: /note="Description of Artificial Sequence: Synthetic peptide"
  source: /note="N-term MeS-Propionyl"
  MOD_RES (6)..(6): hArg
  MOD_RES (8)..(8): hArg
  MOD_RES (9)..(9): Cha
  MOD_RES (14)..(14): Oic
  MOD_RES (15)..(15): Nle
  MOD_RES (17)..(17): 4-Cl-F
KFSRLRPRASHKGXLPF

SEQ ID NO: 319 - protein, 17 aa, Artificial Sequence
  source: /note="Description of Artificial Sequence: Synthetic peptide"
  source: /note="N-term MeS-Propionyl"
  MOD_RES (6)..(6): hArg
  MOD_RES (8)..(8): hArg
  MOD_RES (9)..(9): Cha
  MOD_RES (14)..(14): Oic
  MOD_RES (15)..(15): Nle
  MOD_RES (17)..(17): 4-Cl-F
KFFRLRPRASHKGXLPF

SEQ ID NO: 320 - protein, 17 aa, Artificial Sequence
  source: /note="Description of Artificial Sequence: Synthetic peptide"
  source: /note="N-term MeS-Propionyl"
  MOD_RES (6)..(6): hArg
  MOD_RES (8)..(8): hArg
  MOD_RES (9)..(9): Cha
  MOD_RES (14)..(14): Oic
  MOD_RES (15)..(15): Nle
  MOD_RES (17)..(17): 4-Cl-F
KFLRLRPRASHKGXLPF

SEQ ID NO: 321 - protein, 17 aa, Artificial Sequence
  source: /note="Description of Artificial Sequence: Synthetic peptide"
  source: /note="N-term MeS-Propionyl"
  MOD_RES (6)..(6): hArg
  MOD_RES (8)..(8): hArg
  MOD_RES (9)..(9): Cha
  MOD_RES (14)..(14): Oic
  MOD_RES (15)..(15): Nle
  MOD_RES (17)..(17): 4-Cl-F
KFVRLRPRASHKGXLPF

SEQ ID NO: 322 - protein, 17 aa, Artificial Sequence
  source: /note="Description of Artificial Sequence: Synthetic peptide"
  source: /note="N-term MeS-Propionyl"
  MOD_RES (6)..(6): hArg
  MOD_RES (8)..(8): hArg
  MOD_RES (9)..(9): Cha
  MOD_RES (14)..(14): Oic
  MOD_RES (15)..(15): Nle
  MOD_RES (17)..(17): 4-Cl-F
KFRQLRPRASHKGXLPF

SEQ ID NO: 323 - protein, 17 aa, Artificial Sequence
  source: /note="Description of Artificial Sequence: Synthetic peptide"
  source: /note="N-term MeS-Propionyl"
  MOD_RES (6)..(6): hArg
  MOD_RES (8)..(8): hArg
  MOD_RES (9)..(9): Cha
  MOD_RES (14)..(14): Oic
  MOD_RES (15)..(15): Nle
  MOD_RES (17)..(17): 4-Cl-F
KFRALRPRASHKGXLPF

SEQ ID NO: 324 - protein, 17 aa, Artificial Sequence
  source: /note="Description of Artificial Sequence: Synthetic peptide"
  source: /note="N-term MeS-Propionyl"
  MOD_RES (6)..(6): hArg
  MOD_RES (8)..(8): hArg
  MOD_RES (9)..(9): Cha
  MOD_RES (14)..(14): Oic
  MOD_RES (15)..(15): Nle
  MOD_RES (17)..(17): 4-Cl-F
KFRELRPRASHKGXLPF

SEQ ID NO: 325 - protein, 17 aa, Artificial Sequence
  source: /note="Description of Artificial Sequence: Synthetic peptide"
  source: /note="N-term MeS-Propionyl"
  MOD_RES (6)..(6): hArg
  MOD_RES (8)..(8): hArg
  MOD_RES (9)..(9): Cha
  MOD_RES (14)..(14): Oic
  MOD_RES (15)..(15): Nle
  MOD_RES (17)..(17): 4-Cl-F
KFRTLRPRASHKGXLPF

SEQ ID NO: 326 - protein, 17 aa, Artificial Sequence
  source: /note="Description of Artificial Sequence: Synthetic peptide"
  source: /note="N-term MeS-Propionyl"
  MOD_RES (6)..(6): hArg
  MOD_RES (8)..(8): hArg
  MOD_RES (9)..(9): Cha
  MOD_RES (14)..(14): Oic
  MOD_RES (15)..(15): Nle
  MOD_RES (17)..(17): 4-Cl-F
KFRYLRPRASHKGXLPF

SEQ ID NO: 327 - protein, 17 aa, Artificial Sequence
  source: /note="Description of Artificial Sequence: Synthetic peptide"
  source: /note="N-term MeS-Propionyl"
  MOD_RES (6)..(6): hArg
  MOD_RES (8)..(8): hArg
  MOD_RES (9)..(9): Cha
  MOD_RES (14)..(14): Oic
  MOD_RES (15)..(15): Nle
  MOD_RES (17)..(17): 4-Cl-F
KFRILRPRASHKGXLPF

SEQ ID NO: 328 - protein, 17 aa, Artificial Sequence
  source: /note="Description of Artificial Sequence: Synthetic peptide"
  source: /note="N-term MeS-Propionyl"
  MOD_RES (6)..(6): hArg
  MOD_RES (8)..(8): hArg
  MOD_RES (9)..(9): Cha
  MOD_RES (14)..(14): Oic
  MOD_RES (15)..(15): Nle
  MOD_RES (17)..(17): 4-Cl-F
KFRPLRPRASHKGXLPF

SEQ ID NO: 329 - protein, 17 aa, Artificial Sequence
  source: /note="Description of Artificial Sequence: Synthetic peptide"
  source: /note="N-term MeS-Propionyl"
  MOD_RES (6)..(6): hArg
  MOD_RES (8)..(8): hArg
  MOD_RES (9)..(9): Cha
  MOD_RES (14)..(14): Oic
  MOD_RES (15)..(15): Nle
  MOD_RES (17)..(17): 4-Cl-F
KFRSLRPRASHKGXLPF

SEQ ID NO: 330 - protein, 17 aa, Artificial Sequence
  source: /note="Description of Artificial Sequence: Synthetic peptide"
  source: /note="N-term MeS-Propionyl"
  MOD_RES (6)..(6): hArg
  MOD_RES (8)..(8): hArg
  MOD_RES (9)..(9): Cha
  MOD_RES (14)..(14): Oic
  MOD_RES (15)..(15): Nle
  MOD_RES (17)..(17): 4-Cl-F
KFRFLRPRASHKGXLPF

SEQ ID NO: 331 - protein, 17 aa, Artificial Sequence
  source: /note="Description of Artificial Sequence: Synthetic peptide"
  source: /note="N-term MeS-Propionyl"
  MOD_RES (6)..(6): hArg
  MOD_RES (8)..(8): hArg
  MOD_RES (9)..(9): Cha
  MOD_RES (14)..(14): Oic
  MOD_RES (15)..(15): Nle
  MOD_RES (17)..(17): 4-Cl-F
KFRLLRPRASHKGXLPF

SEQ ID NO: 332 - protein, 17 aa, Artificial Sequence
  source: /note="Description of Artificial Sequence: Synthetic peptide"
  source: /note="N-term MeS-Propionyl"
  MOD_RES (6)..(6): hArg
  MOD_RES (8)..(8): hArg
  MOD_RES (9)..(9): Cha
  MOD_RES (14)..(14): Oic
  MOD_RES (15)..(15): Nle
  MOD_RES (17)..(17): 4-Cl-F
KFRVLRPRASHKGXLPF

SEQ ID NO: 333 - protein, 16 aa, Artificial Sequence
  source: /note="Description of Artificial Sequence: Synthetic peptide"
  source: /note="N-term MeS-Propionyl"
  MOD_RES (5)..(5): hArg
  MOD_RES (7)..(7): hArg
  MOD_RES (8)..(8): Cha
  MOD_RES (13)..(13): Oic
  MOD_RES (14)..(14): Nle
  MOD_RES (16)..(16): 4-Cl-F
FARLRPRASHKGXLPF

SEQ ID NO: 334 - protein, 16 aa, Artificial Sequence
  source: /note="Description of Artificial Sequence: Synthetic peptide"
  source: /note="N-term MeS-Propionyl"
  MOD_RES (5)..(5): hArg
  MOD_RES (7)..(7): hArg
  MOD_RES (8)..(8): Cha
  MOD_RES (13)..(13): Oic
  MOD_RES (14)..(14): Nle
  MOD_RES (16)..(16): 4-Cl-F
FERLRPRASHKGXLPF

SEQ ID NO: 335 - protein, 16 aa, Artificial Sequence
  source: /note="Description of Artificial Sequence: Synthetic peptide"
  source: /note="N-term MeS-Propionyl"
  MOD_RES (5)..(5): hArg
  MOD_RES (7)..(7): hArg
  MOD_RES (8)..(8): Cha
  MOD_RES (13)..(13): Oic
  MOD_RES (14)..(14): Nle
  MOD_RES (16)..(16): 4-Cl-F
FTRLRPRASHKGXLPF

SEQ ID NO: 336 - protein, 16 aa, Artificial Sequence
  source: /note="Description of Artificial Sequence: Synthetic peptide"
  source: /note="N-term MeS-Propionyl"
  MOD_RES (5)..(5): hArg
  MOD_RES (7)..(7): hArg
  MOD_RES (8)..(8): Cha
  MOD_RES (13)..(13): Oic
  MOD_RES (14)..(14): Nle
  MOD_RES (16)..(16): 4-Cl-F
FYRLRPRASHKGXLPF

SEQ ID NO: 337 - protein, 16 aa, Artificial Sequence
  source: /note="Description of Artificial Sequence: Synthetic peptide"
  source: /note="N-term MeS-Propionyl"
  MOD_RES (5)..(5): hArg
  MOD_RES (7)..(7): hArg
  MOD_RES (8)..(8): Cha
  MOD_RES (13)..(13): Oic
  MOD_RES (14)..(14): Nle
  MOD_RES (16)..(16): 4-Cl-F
FIRLRPRASHKGXLPF

SEQ ID NO: 338 - protein, 16 aa, Artificial Sequence
  source: /note="Description of Artificial Sequence: Synthetic peptide"
  source: /note="N-term MeS-Propionyl"
  MOD_RES (5)..(5): hArg
  MOD_RES (7)..(7): hArg
  MOD_RES (8)..(8): Cha
  MOD_RES (13)..(13): Oic
  MOD_RES (14)..(14): Nle
  MOD_RES (16)..(16): 4-Cl-F
FPRLRPRASHKGXLPF

SEQ ID NO: 339 - protein, 16 aa, Artificial Sequence
  source: /note="Description of Artificial Sequence: Synthetic peptide"
  source: /note="N-term MeS-Propionyl"
  MOD_RES (5)..(5): hArg
  MOD_RES (7)..(7): hArg
  MOD_RES (8)..(8): Cha
  MOD_RES (13)..(13): Oic
  MOD_RES (14)..(14): Nle
  MOD_RES (16)..(16): 4-Cl-F
FSRLRPRASHKGXLPF

SEQ ID NO: 340 - protein, 16 aa, Artificial Sequence
  source: /note="Description of Artificial Sequence: Synthetic peptide"
  source: /note="N-term MeS-Propionyl"
  MOD_RES (5)..(5): hArg
  MOD_RES (7)..(7): hArg
  MOD_RES (8)..(8): Cha
  MOD_RES (13)..(13): Oic
  MOD_RES (14)..(14): Nle
  MOD_RES (16)..(16): 4-Cl-F
FFRLRPRASHKGXLPF

SEQ ID NO: 341 - protein, 16 aa, Artificial Sequence
  source: /note="Description of Artificial Sequence: Synthetic peptide"
  source: /note="N-term MeS-Propionyl"
  MOD_RES (5)..(5): hArg
  MOD_RES (7)..(7): hArg
  MOD_RES (8)..(8): Cha
  MOD_RES (13)..(13): Oic
  MOD_RES (14)..(14): Nle
  MOD_RES (16)..(16): 4-Cl-F
FLRLRPRASHKGXLPF

SEQ ID NO: 342 - protein, 16 aa, Artificial Sequence
  source: /note="Description of Artificial Sequence: Synthetic peptide"
  source: /note="N-term MeS-Propionyl"
  MOD_RES (5)..(5): hArg
  MOD_RES (7)..(7): hArg
  MOD_RES (8)..(8): Cha
  MOD_RES (13)..(13): Oic
  MOD_RES (14)..(14): Nle
  MOD_RES (16)..(16): 4-Cl-F
FVRLRPRASHKGXLPF

SEQ ID NO: 343 - protein, 16 aa, Artificial Sequence
  source: /note="Description of Artificial Sequence: Synthetic peptide"
  source: /note="N-term MeS-Propionyl"
  MOD_RES (5)..(5): hArg
  MOD_RES (7)..(7): hArg
  MOD_RES (8)..(8): Cha
  MOD_RES (13)..(13): Oic
  MOD_RES (14)..(14): Nle
  MOD_RES (16)..(16): 4-Cl-F
FRQLRPRASHKGXLPF

SEQ ID NO: 344 - protein, 16 aa, Artificial Sequence
  source: /note="Description of Artificial Sequence: Synthetic peptide"
  source: /note="N-term MeS-Propionyl"
  MOD_RES (5)..(5): hArg
  MOD_RES (7)..(7): hArg
  MOD_RES (8)..(8): Cha
  MOD_RES (13)..(13): Oic
  MOD_RES (14)..(14): Nle
  MOD_RES (16)..(16): 4-Cl-F
FRALRPRASHKGXLPF

SEQ ID NO: 345 - protein, 16 aa, Artificial Sequence
  source: /note="Description of Artificial Sequence: Synthetic peptide"
  source: /note="N-term MeS-Propionyl"
  MOD_RES (5)..(5): hArg
  MOD_RES (7)..(7): hArg
  MOD_RES (8)..(8): Cha
  MOD_RES (13)..(13): Oic
  MOD_RES (14)..(14): Nle
  MOD_RES (16)..(16): 4-Cl-F
FRELRPRASHKGXLPF

SEQ ID NO: 346 - protein, 16 aa, Artificial Sequence
  source: /note="Description of Artificial Sequence: Synthetic peptide"
  source: /note="N-term MeS-Propionyl"
  MOD_RES (5)..(5): hArg
  MOD_RES (7)..(7): hArg
  MOD_RES (8)..(8): Cha
  MOD_RES (13)..(13): Oic
  MOD_RES (14)..(14): Nle
  MOD_RES (16)..(16): 4-Cl-F
FRTLRPRASHKGXLPF

SEQ ID NO: 347 - protein, 16 aa, Artificial Sequence
  source: /note="Description of Artificial Sequence: Synthetic peptide"
  source: /note="N-term MeS-Propionyl"
  MOD_RES (5)..(5): hArg
  MOD_RES (7)..(7): hArg
  MOD_RES (8)..(8): Cha
  MOD_RES (13)..(13): Oic
  MOD_RES (14)..(14): Nle
  MOD_RES (16)..(16): 4-Cl-F
FRYLRPRASHKGXLPF

SEQ ID NO: 348 - protein, 16 aa, Artificial Sequence
  source: /note="Description of Artificial Sequence: Synthetic peptide"
  source: /note="N-term MeS-Propionyl"
  MOD_RES (5)..(5): hArg
  MOD_RES (7)..(7): hArg
  MOD_RES (8)..(8): Cha
  MOD_RES (13)..(13): Oic
  MOD_RES (14)..(14): Nle
  MOD_RES (16)..(16): 4-Cl-F
FRILRPRASHKGXLPF

SEQ ID NO: 349 - protein, 16 aa, Artificial Sequence
  source: /note="Description of Artificial Sequence: Synthetic peptide"
  source: /note="N-term MeS-Propionyl"
  MOD_RES (5)..(5): hArg
  MOD_RES (7)..(7): hArg
  MOD_RES (8)..(8): Cha
  MOD_RES (13)..(13): Oic
  MOD_RES (14)..(14): Nle
  MOD_RES (16)..(16): 4-Cl-F
FRPLRPRASHKGXLPF

SEQ ID NO: 350 - protein, 16 aa, Artificial Sequence
  source: /note="Description of Artificial Sequence: Synthetic peptide"
  source: /note="N-term MeS-Propionyl"
  MOD_RES (5)..(5): hArg
  MOD_RES (7)..(7): hArg
  MOD_RES (8)..(8): Cha
  MOD_RES (13)..(13): Oic
  MOD_RES (14)..(14): Nle
  MOD_RES (16)..(16): 4-Cl-F
FRSLRPRASHKGXLPF

SEQ ID NO: 351 - protein, 16 aa, Artificial Sequence
  source: /note="Description of Artificial Sequence: Synthetic peptide"
  source: /note="N-term MeS-Propionyl"
  MOD_RES (5)..(5): hArg
  MOD_RES (7)..(7): hArg
  MOD_RES (8)..(8): Cha
  MOD_RES (13)..(13): Oic
  MOD_RES (14)..(14): Nle
  MOD_RES (16)..(16): 4-Cl-F
FRFLRPRASHKGXLPF

SEQ ID NO: 352 - protein, 16 aa, Artificial Sequence
  source: /note="Description of Artificial Sequence: Synthetic peptide"
  source: /note="N-term MeS-Propionyl"
  MOD_RES (5)..(5): hArg
  MOD_RES (7)..(7): hArg
  MOD_RES (8)..(8): Cha
  MOD_RES (13)..(13): Oic
  MOD_RES (14)..(14): Nle
  MOD_RES (16)..(16): 4-Cl-F
FRLLRPRASHKGXLPF

SEQ ID NO: 353 - protein, 16 aa, Artificial Sequence
  source: /note="Description of Artificial Sequence: Synthetic peptide"
  source: /note="N-term MeS-Propionyl"
  MOD_RES (5)..(5): hArg
  MOD_RES (7)..(7): hArg
  MOD_RES (8)..(8): Cha
  MOD_RES (13)..(13): Oic
  MOD_RES (14)..(14): Nle
  MOD_RES (16)..(16): 4-Cl-F
FRVLRPRASHKGXLPF

SEQ ID NO: 354 - protein, 16 aa, Artificial Sequence
  source: /note="Description of Artificial Sequence: Synthetic peptide"
  source: /note="N-term MeS-Propionyl"
  MOD_RES (8)..(8): hArg
  MOD_RES (9)..(9): Cha
  MOD_RES (14)..(14): Oic
  MOD_RES (15)..(15): Nle
  source: /note="C-term Amide"
KFRRQRPRASHKGXLP

SEQ ID NO: 355 - protein, 16 aa, Artificial Sequence
  source: /note="Description of Artificial Sequence: Synthetic peptide"
  source: /note="N-term MeS-Propionyl"
  MOD_RES (3)..(4): Cit
  MOD_RES (6)..(6): hArg
  MOD_RES (8)..(8): hArg
  MOD_RES (9)..(9): Cha
  MOD_RES (14)..(14): Oic
  MOD_RES (15)..(15): Nle
  source: /note="C-term Amide"
KFXXLRPRASHKGXLP

SEQ ID NO: 356 - protein, 15 aa, Artificial Sequence
  source: /note="Description of Artificial Sequence: Synthetic peptide"
  source: /note="N-term MeS-Propionyl"
  MOD_RES (2)..(3): Cit
  MOD_RES (5)..(5): hArg
  MOD_RES (7)..(7): hArg
  MOD_RES (8)..(8): Cha
  MOD_RES (13)..(13): Oic
  MOD_RES (14)..(14): Nle
  source: /note="C-term Amide"
FXXLRPRASHKGXLP

SEQ ID NO: 357 - protein, 16 aa, Artificial Sequence
  source: /note="Description of Artificial Sequence: Synthetic peptide"
  source: /note="N-term MeS-Propionyl"
  MOD_RES (6)..(6): hArg
  MOD_RES (8)..(8): hArg
  MOD_RES (9)..(9): Cha
  MOD_RES (14)..(14): Oic
  MOD_RES (15)..(15): Nle
  source: /note="C-term Amide"
KFRRLRPRASHKGXLP

SEQ ID NO: 358 - protein, 15 aa, Artificial Sequence
  source: /note="Description of Artificial Sequence: Synthetic peptide"
  source: /note="N-term MeS-Propionyl"
  MOD_RES (5)..(5): hArg
  MOD_RES (7)..(7): hArg
  MOD_RES (8)..(8): Cha
  MOD_RES (13)..(13): Oic
  MOD_RES (14)..(14): Nle
  source: /note="C-term Amide"
FQQLRPRASHKGXLP

SEQ ID NO: 359 - protein, 16 aa, Artificial Sequence
  source: /note="Description of Artificial Sequence: Synthetic peptide"
  source: /note="N-term MeS-Propionyl"
  MOD_RES (7)..(7): hArg
  MOD_RES (8)..(8): Cha
  MOD_RES (13)..(13): Oic
  MOD_RES (14)..(14): Nle
  MOD_RES (16)..(16): 4-Cl-F
FRRQRPRASHKGXLPF

SEQ ID NO: 360 - protein, 16 aa, Artificial Sequence
  source: /note="Description of Artificial Sequence: Synthetic peptide"
  source: /note="N-term MeS-Propionyl"
  MOD_RES (2)..(3): hArg
  MOD_RES (5)..(5): hArg
  MOD_RES (7)..(7): hArg
  MOD_RES (8)..(8): Cha
  MOD_RES (13)..(13): Oic
  MOD_RES (14)..(14): Nle
  MOD_RES (16)..(16): 4-Cl-F
FRRQRPRASHKGXLPF

SEQ ID NO: 361 - protein, 16 aa, Artificial Sequence
  source: /note="Description of Artificial Sequence: Synthetic peptide"
  source: /note="N-term MeS-Propionyl"
  MOD_RES (2)..(3): hArg
  MOD_RES (5)..(5): hArg
  MOD_RES (7)..(7): hArg
  MOD_RES (8)..(8): Cha
  MOD_RES (13)..(13): Oic
  MOD_RES (14)..(14): Nle
  MOD_RES (16)..(16): 4-Cl-F
ARRQRPRASHKGXLPF

SEQ ID NO: 362 - protein, 15 aa, Artificial Sequence
  source: /note="Description of Artificial Sequence: Synthetic peptide"
  source: /note="N-term MeS-Propionyl"
  MOD_RES (4)..(4): hArg
  MOD_RES (6)..(6): hArg
  MOD_RES (7)..(7): Cha
  MOD_RES (12)..(12): Oic
  MOD_RES (13)..(13): Nle
  MOD_RES (15)..(15): 4-Cl-F
FAQRPRASHKGXLPF

SEQ ID NO: 363 - protein, 16 aa, Artificial Sequence
  source: /note="Description of Artificial Sequence: Synthetic peptide"
  source: /note="N-term MeS-Propionyl"
  MOD_RES (2)..(2): hArg
  MOD_RES (5)..(5): hArg
  MOD_RES (7)..(7): hArg
  MOD_RES (8)..(8): Cha
  MOD_RES (13)..(13): Oic
  MOD_RES (14)..(14): Nle
  MOD_RES (16)..(16): 4-Cl-F
FRAQRPRASHKGXLPF

SEQ ID NO: 364 - protein, 16 aa, Artificial Sequence
  source: /note="Description of Artificial Sequence: Synthetic peptide"
  source: /note="N-term MeS-Propionyl"
  MOD_RES (2)..(3): hArg
  MOD_RES (5)..(5): hArg
  MOD_RES (7)..(7): hArg
  MOD_RES (8)..(8): Cha
  MOD_RES (13)..(13): Oic
  MOD_RES (14)..(14): Nle
  MOD_RES (16)..(16): 4-Cl-F
FRRARPRASHKGXLPF

SEQ ID NO: 365 - protein, 16 aa, Artificial Sequence
  source: /note="Description of Artificial Sequence: Synthetic peptide"
  source: /note="N-term MeS-Propionyl"
  MOD_RES (2)..(3): hArg
  MOD_RES (7)..(7): hArg
  MOD_RES (8)..(8): Cha
  MOD_RES (13)..(13): Oic
  MOD_RES (14)..(14): Nle
  MOD_RES (16)..(16): 4-Cl-F
FRRQAPRASHKGXLPF

SEQ ID NO: 366 - protein, 16 aa, Artificial Sequence
  source: /note="Description of Artificial Sequence: Synthetic peptide"
  source: /note="N-term MeS-Propionyl"
  MOD_RES (2)..(3): hArg
  MOD_RES (5)..(5): hArg
  MOD_RES (7)..(7): hArg
  MOD_RES (8)..(8): Cha
  MOD_RES (9)..(9): K(NPEG11)
  MOD_RES (13)..(13): Oic
  MOD_RES (14)..(14): Nle
  MOD_RES (16)..(16): 4-Cl-F
FRRQRPRAKHKGXLPF

SEQ ID NO: 367 - protein, 16 aa, Artificial Sequence
  source: /note="Description of Artificial Sequence: Synthetic peptide"
  source: /note="N-term MeS-Propionyl"
  MOD_RES (2)..(3): hArg
  MOD_RES (5)..(5): hArg
  MOD_RES (7)..(7): hArg
  MOD_RES (8)..(8): Cha
  MOD_RES (10)..(10): K(NPEG11)
  MOD_RES (13)..(13): Oic
  MOD_RES (14)..(14): Nle
  MOD_RES (16)..(16): 4-Cl-F
FRRQRPRASKKGXLPF

SEQ ID NO: 368 - protein, 16 aa, Artificial Sequence
  source: /note="Description of Artificial Sequence: Synthetic peptide"
  source: /note="N-term MeS-Propionyl"
  MOD_RES (2)..(3): hArg
  MOD_RES (5)..(5): hArg
  MOD_RES (7)..(7): hArg
  MOD_RES (8)..(8): Cha
  MOD_RES (9)..(9): Atz(PEG10)
  MOD_RES (13)..(13): Oic
  MOD_RES (14)..(14): Nle
  MOD_RES (16)..(16): 4-Cl-F
FRRQRPRAAHKGXLPF

SEQ ID NO: 369 - protein, 16 aa, Artificial Sequence
  source: /note="Description of Artificial Sequence: Synthetic peptide"
  source: /note="N-term MeS-Propionyl"
  MOD_RES (2)..(3): hArg
  MOD_RES (5)..(5): hArg
  MOD_RES (7)..(7): hArg
  MOD_RES (8)..(8): Cha
  MOD_RES (10)..(10): Atz(PEG10)
  MOD_RES (13)..(13): Oic
  MOD_RES (14)..(14): Nle
  MOD_RES (16)..(16): 4-Cl-F
FRRQRPRASAKGXLPF

SEQ ID NO: 370 - protein, 16 aa, Artificial Sequence
  source: /note="Description of Artificial Sequence: Synthetic peptide"
  source: /note="N-term MeS-Propionyl"
  MOD_RES (2)..(3): hArg
  MOD_RES (5)..(5): hArg
  MOD_RES (7)..(7): hArg
  MOD_RES (8)..(8): Cha
  MOD_RES (13)..(13): Oic
  MOD_RES (14)..(14): Nle
  MOD_RES (16)..(16): 4-Cl-F
FRRQRPRATHKGXLPF

SEQ ID NO: 371 - protein, 16 aa, Artificial Sequence
  source: /note="Description of Artificial Sequence: Synthetic peptide"
  source: /note="N-term MeS-Propionyl"
  MOD_RES (2)..(3): hArg
  MOD_RES (5)..(5): hArg
  MOD_RES (7)..(7): hArg
  MOD_RES (8)..(8): Cha
  MOD_RES (13)..(13): Oic
  MOD_RES (14)..(14): Nle
  MOD_RES (16)..(16): 4-Cl-F
FRRQRPRAAHKGXLPF

SEQ ID NO: 372 - protein, 16 aa, Artificial Sequence
  source: /note="Description of Artificial Sequence: Synthetic peptide"
  source: /note="N-term MeS-Propionyl"
  MOD_RES (2)..(3): hArg
  MOD_RES (5)..(5): hArg
  MOD_RES (7)..(7): hArg
  MOD_RES (8)..(8): Cha
  MOD_RES (9)..(9): Abu
  MOD_RES (13)..(13): Oic
  MOD_RES (14)..(14): Nle
  MOD_RES (16)..(16): 4-Cl-F
FRRQRPRAXHKGXLPF

SEQ ID NO: 373 - protein, 16 aa, Artificial Sequence
  source: /note="Description of Artificial Sequence: Synthetic peptide"
  source: /note="N-term MeS-Propionyl"
  MOD_RES (2)..(3): hArg
  MOD_RES (5)..(5): hArg
  MOD_RES (7)..(7): hArg
  MOD_RES (8)..(8): Cha
  MOD_RES (9)..(9): Nle
  MOD_RES (13)..(13): Oic
  MOD_RES (14)..(14): Nle
  MOD_RES (16)..(16): 4-Cl-F
FRRQRPRALHKGXLPF

SEQ ID NO: 374 - protein, 16 aa, Artificial Sequence
  source: /note="Description of Artificial Sequence: Synthetic peptide"
  source: /note="N-term MeS-Propionyl"
  MOD_RES (2)..(3): hArg
  MOD_RES (5)..(5): hArg
  MOD_RES (7)..(7): hArg
  MOD_RES (8)..(8): Cha
  MOD_RES (9)..(9): Nva
  MOD_RES (13)..(13): Oic
  MOD_RES (14)..(14): Nle
  MOD_RES (16)..(16): 4-Cl-F
FRRQRPRAVHKGXLPF

SEQ ID NO: 375 - protein, 16 aa, Artificial Sequence
  source: /note="Description of Artificial Sequence: Synthetic peptide"
  source: /note="N-term MeS-Propionyl"
  MOD_RES (2)..(3): hArg
  MOD_RES (5)..(5): hArg
  MOD_RES (7)..(7): hArg
  MOD_RES (8)..(8): Cha
  MOD_RES (13)..(13): Oic
  MOD_RES (14)..(14): Nle
  MOD_RES (16)..(16): 4-Cl-F
FRRQRPRAVHKGXLPF

SEQ ID NO: 376 - protein, 16 aa, Artificial Sequence
  source: /note="Description of Artificial Sequence: Synthetic peptide"
  source: /note="N-term MeS-Propionyl"
  MOD_RES (2)..(3): hArg
  MOD_RES (5)..(5): hArg
  MOD_RES (7)..(7): hArg
  MOD_RES (8)..(8): Cha
  MOD_RES (13)..(13): Oic
  MOD_RES (14)..(14): Nle
  MOD_RES (16)..(16): 4-Cl-F
FRRQRPRAGHKGXLPF

SEQ ID NO: 377 - protein, 13 aa, Artificial Sequence
  source: /note="Description of Artificial Sequence: Synthetic peptide"
  MOD_RES (1)..(1): PyroGlu
  MOD_RES (5)..(5): Chg
  MOD_RES (11)..(11): Nle
  MOD_RES (12)..(12): 1-Nal
ERPRGFHKGPLAF

SEQ ID NO: 378 - protein, 16 aa, Artificial Sequence
  source: /note="Description of Artificial Sequence: Synthetic peptide"
  source: /note="N-term MeS-Propionyl"
  MOD_RES (2)..(3): hArg
  MOD_RES (5)..(5): hArg
  MOD_RES (7)..(7): hArg
  MOD_RES (8)..(8): Cha
  MOD_RES (13)..(13): Oic
  MOD_RES (14)..(14): Nle
  MOD_RES (16)..(16): 4-Cl-F
FRRQRPRALHKGXLPF

SEQ ID NO: 379 - protein, 16 aa, Artificial Sequence
  source: /note="Description of Artificial Sequence: Synthetic peptide"
  source: /note="N-term MeS-Propionyl"
  MOD_RES (2)..(3): hArg
  MOD_RES (5)..(5): hArg
  MOD_RES (7)..(7): hArg
  MOD_RES (8)..(8): Cha
  MOD_RES (13)..(13): Oic
  MOD_RES (14)..(14): Nle
  MOD_RES (16)..(16): 4-Cl-F
FRRQRPRAIHKGXLPF

SEQ ID NO: 380 - protein, 16 aa, Artificial Sequence
  source: /note="Description of Artificial Sequence: Synthetic peptide"
  source: /note="N-term MeS-Propionyl"
  MOD_RES (2)..(3): hArg
  MOD_RES (5)..(5): hArg
  MOD_RES (7)..(7): hArg
  MOD_RES (8)..(8): Cha
  MOD_RES (9)..(9): CPG
  MOD_RES (13)..(13): Oic
  MOD_RES (14)..(14): Nle
  MOD_RES (16)..(16): 4-Cl-F
FRRQRPRAGHKGXLPF

SEQ ID NO: 381 - protein, 16 aa, Artificial Sequence
  source: /note="Description of Artificial Sequence: Synthetic peptide"
  source: /note="N-term MeS-Propionyl"
  MOD_RES (2)..(3): hArg
  MOD_RES (5)..(5): hArg
  MOD_RES (7)..(7): hArg
  MOD_RES (8)..(8): Cha
  MOD_RES (9)..(9): Chg
  MOD_RES (13)..(13): Oic
  MOD_RES (14)..(14): Nle
  MOD_RES (16)..(16): 4-Cl-F
FRRQRPRAGHKGXLPF

SEQ ID NO: 382 - protein, 16 aa, Artificial Sequence
  source: /note="Description of Artificial Sequence: Synthetic peptide"
  source: /note="N-term MeS-Propionyl"
  MOD_RES (2)..(3): hArg
  MOD_RES (5)..(5): hArg
  MOD_RES (7)..(7): hArg
  MOD_RES (8)..(9): Cha
  MOD_RES (13)..(13): Oic
  MOD_RES (14)..(14): Nle
  MOD_RES (16)..(16): 4-Cl-F
FRRQRPRAAHKGXLPF

SEQ ID NO: 383 - protein, 16 aa, Artificial Sequence
  source: /note="Description of Artificial Sequence: Synthetic peptide"
  source: /note="N-term MeS-Propionyl"
  MOD_RES (2)..(3): hArg
  MOD_RES (5)..(5): hArg
  MOD_RES (7)..(7): hArg
  MOD_RES (8)..(8): Cha
  MOD_RES (13)..(13): Oic
  MOD_RES (14)..(14): Nle
  MOD_RES (16)..(16): 4-Cl-F
FRRQRPRAHHKGXLPF

SEQ ID NO: 384 - protein, 16 aa, Artificial Sequence
  source: /note="Description of Artificial Sequence: Synthetic peptide"
  source: /note="N-term MeS-Propionyl"
  MOD_RES (2)..(3): hArg
  MOD_RES (5)..(5): hArg
  MOD_RES (7)..(7): hArg
  MOD_RES (8)..(8): Cha
  MOD_RES (13)..(13): Oic
  MOD_RES (14)..(14): Nle
  MOD_RES (16)..(16): 4-Cl-F
FRRQRPRAYHKGXLPF

SEQ ID NO: 385 - protein, 16 aa, Artificial Sequence
  source: /note="Description of Artificial Sequence: Synthetic peptide"
  source: /note="N-term MeS-Propionyl"
  MOD_RES (2)..(3): hArg
  MOD_RES (5)..(5): hArg
  MOD_RES (7)..(7): hArg
  MOD_RES (8)..(8): Cha
  MOD_RES (13)..(13): Oic
  MOD_RES (14)..(14): Nle
  MOD_RES (16)..(16): 4-Cl-F
FRRQRPRAWHKGXLPF

SEQ ID NO: 386 - protein, 16 aa, Artificial Sequence
  source: /note="Description of Artificial Sequence: Synthetic peptide"
  source: /note="N-term MeS-Propionyl"
  MOD_RES (2)..(3): hArg
  MOD_RES (5)..(5): hArg
  MOD_RES (7)..(7): hArg
  MOD_RES (8)..(8): Cha
  MOD_RES (13)..(13): Oic
  MOD_RES (14)..(14): Nle
  MOD_RES (16)..(16): 4-Cl-F
FRRQRPRAFHKGXLPF

SEQ ID NO: 387 - protein, 16 aa, Artificial Sequence
  source: /note="Description of Artificial Sequence: Synthetic peptide"
  source: /note="N-term MeS-Propionyl"
  MOD_RES (2)..(3): hArg
  MOD_RES (5)..(5): hArg
  MOD_RES (7)..(7): hArg
  MOD_RES (8)..(8): Cha
  MOD_RES (9)..(9): NMePhe
  MOD_RES (13)..(13): Oic
  MOD_RES (14)..(14): Nle
  MOD_RES (16)..(16): 4-Cl-F
FRRQRPRAFHKGXLPF

SEQ ID NO: 388 - protein, 16 aa, Artificial Sequence
  source: /note="Description of Artificial Sequence: Synthetic peptide"
  source: /note="N-term MeS-Propionyl"
  MOD_RES (2)..(3): hArg
  MOD_RES (5)..(5): hArg
  MOD_RES (7)..(7): hArg
  MOD_RES (8)..(8): Cha
  MOD_RES (9)..(9): 1-Nal
  MOD_RES (13)..(13): Oic
  MOD_RES (14)..(14): Nle
  MOD_RES (16)..(16): 4-Cl-F
FRRQRPRAAHKGXLPF

SEQ ID NO: 389 - protein, 16 aa, Artificial Sequence
  source: /note="Description of Artificial Sequence: Synthetic peptide"
  source: /note="N-term MeS-Propionyl"
  MOD_RES (2)..(3): hArg
  MOD_RES (5)..(5): hArg
  MOD_RES (7)..(7): hArg
  MOD_RES (8)..(8): Cha
  MOD_RES (9)..(9): 2-Nal
  MOD_RES (13)..(13): Oic
  MOD_RES (14)..(14): Nle
  MOD_RES (16)..(16): 4-Cl-F
FRRQRPRAAHKGXLPF

SEQ ID NO: 390 - protein, 16 aa, Artificial Sequence
  source: /note="Description of Artificial Sequence: Synthetic peptide"
  source: /note="N-term MeS-Propionyl"
  MOD_RES (2)..(3): hArg
  MOD_RES (5)..(5): hArg
  MOD_RES (7)..(7): hArg
  MOD_RES (8)..(8): Cha
  MOD_RES (9)..(9): Bip
  MOD_RES (13)..(13): Oic
  MOD_RES (14)..(14): Nle
  MOD_RES (16)..(16): 4-Cl-F
FRRQRPRAFHKGXLPF

SEQ ID NO: 391 - protein, 16 aa, Artificial Sequence
  source: /note="Description of Artificial Sequence: Synthetic peptide"
  source: /note="N-term MeS-Propionyl"
  MOD_RES (2)..(3): hArg
  MOD_RES (5)..(5): hArg
  MOD_RES (7)..(7): hArg
  MOD_RES (8)..(8): Cha
  MOD_RES (9)..(9): Igl
  MOD_RES (13)..(13): Oic
  MOD_RES (14)..(14): Nle
  MOD_RES (16)..(16): 4-Cl-F
FRRQRPRAGHKGXLPF

SEQ ID NO: 392 - protein, 16 aa, Artificial Sequence
  source: /note="Description of Artificial Sequence: Synthetic peptide"
  source: /note="N-term MeS-Propionyl"
  MOD_RES (2)..(3): hArg
  MOD_RES (5)..(5): hArg
  MOD_RES (7)..(7): hArg
  MOD_RES (8)..(8): Cha
  MOD_RES (9)..(9): 4-Cl-F
  MOD_RES (13)..(13): Oic
  MOD_RES (14)..(14): Nle
  MOD_RES (16)..(16): 4-Cl-F
FRRQRPRAFHKGXLPF

SEQ ID NO: 393 - protein, 16 aa, Artificial Sequence
  source: /note="Description of Artificial Sequence: Synthetic peptide"
  source: /note="N-term MeS-Propionyl"
  MOD_RES (2)..(3): hArg
  MOD_RES (5)..(5): hArg
  MOD_RES (7)..(7): hArg
  MOD_RES (8)..(8): Cha
  MOD_RES (9)..(9): 4-F-F
  MOD_RES (13)..(13): Oic
  MOD_RES (14)..(14): Nle
  MOD_RES (16)..(16): 4-Cl-F
FRRQRPRAFHKGXLPF

SEQ ID NO: 394 - protein, 16 aa, Artificial Sequence
  source: /note="Description of Artificial Sequence: Synthetic peptide"
  source: /note="N-term MeS-Propionyl"
  MOD_RES (2)..(3): hArg
  MOD_RES (5)..(5): hArg
  MOD_RES (7)..(7): hArg
  MOD_RES (8)..(8): Cha
  MOD_RES (9)..(9): pI-Phe
  MOD_RES (13)..(13): Oic
  MOD_RES (14)..(14): Nle
  MOD_RES (16)..(16): 4-Cl-F
FRRQRPRAFHKGXLPF

SEQ ID NO: 395 - protein, 16 aa, Artificial Sequence
  source: /note="Description of Artificial Sequence: Synthetic peptide"
  source: /note="N-term MeS-Propionyl"
  MOD_RES (2)..(3): hArg
  MOD_RES (5)..(5): hArg
  MOD_RES (7)..(7): hArg
  MOD_RES (8)..(8): Cha
  MOD_RES (9)..(9): 2Pal
  MOD_RES (13)..(13): Oic
  MOD_RES (14)..(14): Nle
  MOD_RES (16)..(16): 4-Cl-F
FRRQRPRAAHKGXLPF

SEQ ID NO: 396 - protein, 16 aa, Artificial Sequence
  source: /note="Description of Artificial Sequence: Synthetic peptide"
  source: /note="N-term MeS-Propionyl"
  MOD_RES (2)..(3): hArg
  MOD_RES (5)..(5): hArg
  MOD_RES (7)..(7): hArg
  MOD_RES (8)..(8): Cha
  MOD_RES (9)..(9): 3Pal
  MOD_RES (13)..(13): Oic
  MOD_RES (14)..(14): Nle
  MOD_RES (16)..(16): 4-Cl-F
FRRQRPRAAHKGXLPF

SEQ ID NO: 397 - protein, 16 aa, Artificial Sequence
  source: /note="Description of Artificial Sequence: Synthetic peptide"
  source: /note="N-term MeS-Propionyl"
  MOD_RES (2)..(3): hArg
  MOD_RES (5)..(5): hArg
  MOD_RES (7)..(7): hArg
  MOD_RES (8)..(8): Cha
  MOD_RES (9)..(9): Tic
  MOD_RES (13)..(13): Oic
  MOD_RES (14)..(14): Nle
  MOD_RES (16)..(16): 4-Cl-F
FRRQRPRAXHKGXLPF

SEQ ID NO: 398 - protein, 16 aa, Artificial Sequence
  source: /note="Description of Artificial Sequence: Synthetic peptide"
  source: /note="N-term MeS-Propionyl"
  MOD_RES (2)..(3): hArg
  MOD_RES (5)..(5): hArg
  MOD_RES (7)..(7): hArg
  MOD_RES (8)..(8): Cha
  MOD_RES (9)..(9): Orn
  MOD_RES (13)..(13): Oic
  MOD_RES (14)..(14): Nle
  MOD_RES (16)..(16): 4-Cl-F
FRRQRPRAXHKGXLPF

SEQ ID NO: 399 - protein, 16 aa, Artificial Sequence
  source: /note="Description of Artificial Sequence: Synthetic peptide"
  source: /note="N-term MeS-Propionyl"
  MOD_RES (2)..(3): hArg
  MOD_RES (5)..(5): hArg
  MOD_RES (7)..(7): hArg
  MOD_RES (8)..(8): Cha
  MOD_RES (9)..(9): Dab
  MOD_RES (13)..(13): Oic
  MOD_RES (14)..(14): Nle
  MOD_RES (16)..(16): 4-Cl-F
FRRQRPRAXHKGXLPF

SEQ ID NO: 400 - protein, 16 aa, Artificial Sequence
  source: /note="Description of Artificial Sequence: Synthetic peptide"
  source: /note="N-term MeS-Propionyl"
  MOD_RES (2)..(3): hArg
  MOD_RES (5)..(5): hArg
  MOD_RES (7)..(7): hArg
  MOD_RES (8)..(8): Cha
  MOD_RES (9)..(9): Dap
  MOD_RES (13)..(13): Oic
  MOD_RES (14)..(14): Nle
  MOD_RES (16)..(16): 4-Cl-F
FRRQRPRAXHKGXLPF

SEQ ID NO: 401 - protein, 16 aa, Artificial Sequence
  source: /note="Description of Artificial Sequence: Synthetic peptide"
  source: /note="N-term MeS-Propionyl"
  MOD_RES (2)..(3): hArg
  MOD_RES (5)..(5): hArg
  MOD_RES (7)..(7): hArg
  MOD_RES (8)..(8): Cha
  MOD_RES (13)..(13): Oic
  MOD_RES (14)..(14): Nle
  MOD_RES (16)..(16): 4-Cl-F
FRRQRPRASTKGXLPF

SEQ ID NO: 402 - protein, 16 aa, Artificial Sequence
  source: /note="Description of Artificial Sequence: Synthetic peptide"
  source: /note="N-term MeS-Propionyl"
  MOD_RES (2)..(3): hArg
  MOD_RES (5)..(5): hArg
  MOD_RES (7)..(7): hArg
  MOD_RES (8)..(8): Cha
  MOD_RES (13)..(13): Oic
  MOD_RES (14)..(14): Nle
  MOD_RES (16)..(16): 4-Cl-F
FRRQRPRASAKGXLPF

SEQ ID NO: 403 - protein, 16 aa, Artificial Sequence
  source: /note="Description of Artificial Sequence: Synthetic peptide"
  source: /note="N-term MeS-Propionyl"
  MOD_RES (2)..(3): hArg
  MOD_RES (5)..(5): hArg
  MOD_RES (7)..(7): hArg
  MOD_RES (8)..(8): Cha
  MOD_RES (10)..(10): Abu
  MOD_RES (13)..(13): Oic
  MOD_RES (14)..(14): Nle
  MOD_RES (16)..(16): 4-Cl-F
FRRQRPRASXKGXLPF

SEQ ID NO: 404 - protein, 16 aa, Artificial Sequence
  source: /note="Description of Artificial Sequence: Synthetic peptide"
  source: /note="N-term MeS-Propionyl"
  MOD_RES (2)..(3): hArg
  MOD_RES (5)..(5): hArg
  MOD_RES (7)..(7): hArg
  MOD_RES (8)..(8): Cha
  MOD_RES (10)..(10): Nle
  MOD_RES (13)..(13): Oic
  MOD_RES (14)..(14): Nle
  MOD_RES (16)..(16): 4-Cl-F
FRRQRPRASLKGXLPF

SEQ ID NO: 405 - protein, 16 aa, Artificial Sequence
  source: /note="Description of Artificial Sequence: Synthetic peptide"
  source: /note="N-term MeS-Propionyl"
  MOD_RES (2)..(3): hArg
  MOD_RES (5)..(5): hArg
  MOD_RES (7)..(7): hArg
  MOD_RES (8)..(8): Cha
  MOD_RES (10)..(10): Nva
  MOD_RES (13)..(13): Oic
  MOD_RES (14)..(14): Nle
  MOD_RES (16)..(16): 4-Cl-F
FRRQRPRASVKGXLPF

SEQ ID NO: 406 - protein, 16 aa, Artificial Sequence
  source: /note="Description of Artificial Sequence: Synthetic peptide"
  source: /note="N-term MeS-Propionyl"
  MOD_RES (2)..(3): hArg
  MOD_RES (5)..(5): hArg
  MOD_RES (7)..(7): hArg
  MOD_RES (8)..(8): Cha
  MOD_RES (13)..(13): Oic
  MOD_RES (14)..(14): Nle
  MOD_RES (16)..(16): 4-Cl-F
FRRQRPRASVKGXLPF

SEQ ID NO: 407 - protein, 16 aa, Artificial Sequence
  source: /note="Description of Artificial Sequence: Synthetic peptide"
  source: /note="N-term MeS-Propionyl"
  MOD_RES (2)..(3): hArg
  MOD_RES (5)..(5): hArg
  MOD_RES (7)..(7): hArg
  MOD_RES (8)..(8): Cha
  MOD_RES (13)..(13): Oic
  MOD_RES (14)..(14): Nle
  MOD_RES (16)..(16): 4-Cl-F
FRRQRPRASGKGXLPF

SEQ ID NO: 408 - protein, 16 aa, Artificial Sequence
  source: /note="Description of Artificial Sequence: Synthetic peptide"
  source: /note="N-term MeS-Propionyl"
  MOD_RES (2)..(3): hArg
  MOD_RES (5)..(5): hArg
  MOD_RES (7)..(7): hArg
  MOD_RES (8)..(8): Cha
  MOD_RES (13)..(13): Oic
  MOD_RES (14)..(14): Nle
  MOD_RES (16)..(16): 4-Cl-F
FRRQRPRASLKGXLPF

SEQ ID NO: 409 - protein, 16 aa, Artificial Sequence
  source: /note="Description of Artificial Sequence: Synthetic peptide"
  source: /note="N-term MeS-Propionyl"
  MOD_RES (2)..(3): hArg
  MOD_RES (5)..(5): hArg
  MOD_RES (7)..(7): hArg
  MOD_RES (8)..(8): Cha
  MOD_RES (13)..(13): Oic
  MOD_RES (14)..(14): Nle
  MOD_RES (16)..(16): 4-Cl-F
FRRQRPRASIKGXLPF

SEQ ID NO: 410 - protein, 16 aa, Artificial Sequence
  source: /note="Description of Artificial Sequence: Synthetic peptide"
  source: /note="N-term MeS-Propionyl"
  MOD_RES (2)..(3): hArg
  MOD_RES (5)..(5): hArg
  MOD_RES (7)..(7): hArg
  MOD_RES (8)..(8): Cha
  MOD_RES (10)..(10): CPG
  MOD_RES (13)..(13): Oic
  MOD_RES (14)..(14): Nle
  MOD_RES (16)..(16): 4-Cl-F
FRRQRPRASGKGXLPF

SEQ ID NO: 411 - protein, 16 aa, Artificial Sequence
  source: /note="Description of Artificial Sequence: Synthetic peptide"
  source: /note="N-term MeS-Propionyl"
  MOD_RES (2)..(3): hArg
  MOD_RES (5)..(5): hArg
  MOD_RES (7)..(7): hArg
  MOD_RES (8)..(8): Cha
  MOD_RES (10)..(10): Chg
  MOD_RES (13)..(13): Oic
  MOD_RES (14)..(14): Nle
  MOD_RES (16)..(16): 4-Cl-F
FRRQRPRASGKGXLPF

SEQ ID NO: 412 - protein, 16 aa, Artificial Sequence
  source: /note="Description of Artificial Sequence: Synthetic peptide"
  source: /note="N-term MeS-Propionyl"
  MOD_RES (2)..(3): hArg
  MOD_RES (5)..(5): hArg
  MOD_RES (7)..(7): hArg
  MOD_RES (8)..(8): Cha
  MOD_RES (10)..(10): Cha
  MOD_RES (13)..(13): Oic
  MOD_RES (14)..(14): Nle
  MOD_RES (16)..(16): 4-Cl-F
FRRQRPRASAKGXLPF

SEQ ID NO: 413 - protein, 16 aa, Artificial Sequence
  source: /note="Description of Artificial Sequence: Synthetic peptide"
  source: /note="N-term MeS-Propionyl"
  MOD_RES (2)..(3): hArg
  MOD_RES (5)..(5): hArg
  MOD_RES (7)..(7): hArg
  MOD_RES (8)..(8): Cha
  MOD_RES (13)..(13): Oic
  MOD_RES (14)..(14): Nle
  MOD_RES (16)..(16): 4-Cl-F
FRRQRPRASHKGXLPF

SEQ ID NO: 414 - protein, 16 aa, Artificial Sequence
  source: /note="Description of Artificial Sequence: Synthetic peptide"
  source: /note="N-term MeS-Propionyl"
  MOD_RES (2)..(3): hArg
  MOD_RES (5)..(5): hArg
  MOD_RES (7)..(7): hArg
  MOD_RES (8)..(8): Cha
  MOD_RES (13)..(13): Oic
  MOD_RES (14)..(14): Nle
  MOD_RES (16)..(16): 4-Cl-F
FRRQRPRASYKGXLPF

SEQ ID NO: 415 - protein, 16 aa, Artificial Sequence
  source: /note="Description of Artificial Sequence: Synthetic peptide"
  source: /note="N-term MeS-Propionyl"
  MOD_RES (2)..(3): hArg
  MOD_RES (5)..(5): hArg
  MOD_RES (7)..(7): hArg
  MOD_RES (8)..(8): Cha
  MOD_RES (13)..(13): Oic
  MOD_RES (14)..(14): Nle
  MOD_RES (16)..(16): 4-Cl-F
FRRQRPRASWKGXLPF

SEQ ID NO: 416 - protein, 16 aa, Artificial Sequence
  source: /note="Description of Artificial Sequence: Synthetic peptide"
  source: /note="N-term MeS-Propionyl"
  MOD_RES (2)..(3): hArg
  MOD_RES (5)..(5): hArg
  MOD_RES (7)..(7): hArg
  MOD_RES (8)..(8): Cha
  MOD_RES (13)..(13): Oic
  MOD_RES (14)..(14): Nle
  MOD_RES (16)..(16): 4-Cl-F
FRRQRPRASFKGXLPF

SEQ ID NO: 417 - protein, 16 aa, Artificial Sequence
  source: /note="Description of Artificial Sequence: Synthetic peptide"
  source: /note="N-term MeS-Propionyl"
  MOD_RES (2)..(3): hArg
  MOD_RES (5)..(5): hArg
  MOD_RES (7)..(7): hArg
  MOD_RES (8)..(8): Cha
  MOD_RES (10)..(10): NMePhe
  MOD_RES (13)..(13): Oic
  MOD_RES (14)..(14): Nle
  MOD_RES (16)..(16): 4-Cl-F
FRRQRPRASFKGXLPF

SEQ ID NO: 418 - protein, 16 aa, Artificial Sequence
  source: /note="Description of Artificial Sequence: Synthetic peptide"
  source: /note="N-term MeS-Propionyl"
  MOD_RES (2)..(3): hArg
  MOD_RES (5)..(5): hArg
  MOD_RES (7)..(7): hArg
  MOD_RES (8)..(8): Cha
  MOD_RES (10)..(10): 1-Nal
  MOD_RES (13)..(13): Oic
  MOD_RES (14)..(14): Nle
  MOD_RES (16)..(16): 4-Cl-F
FRRQRPRASAKGXLPF

SEQ ID NO: 419 - protein, 16 aa, Artificial Sequence
  source: /note="Description of Artificial Sequence: Synthetic peptide"
  source: /note="N-term MeS-Propionyl"
  MOD_RES (2)..(3): hArg
  MOD_RES (5)..(5): hArg
  MOD_RES (7)..(7): hArg
  MOD_RES (8)..(8): Cha
  MOD_RES (10)..(10): 2-Nal
  MOD_RES (13)..(13): Oic
  MOD_RES (14)..(14): Nle
  MOD_RES (16)..(16): 4-Cl-F
FRRQRPRASAKGXLPF

SEQ ID NO: 420 - protein, 16 aa, Artificial Sequence
  source: /note="Description of Artificial Sequence: Synthetic peptide"
  source: /note="N-term MeS-Propionyl"
  MOD_RES (2)..(3): hArg
  MOD_RES (5)..(5): hArg
  MOD_RES (7)..(7): hArg
  MOD_RES (8)..(8): Cha
  MOD_RES (10)..(10): Bip
  MOD_RES (13)..(13): Oic
  MOD_RES (14)..(14): Nle
  MOD_RES (16)..(16): 4-Cl-F
FRRQRPRASFKGXLPF

SEQ ID NO: 421 - protein, 16 aa, Artificial Sequence
  source: /note="Description of Artificial Sequence: Synthetic peptide"
  source: /note="N-term MeS-Propionyl"
  MOD_RES (2)..(3): hArg
  MOD_RES (5)..(5): hArg
  MOD_RES (7)..(7): hArg
  MOD_RES (8)..(8): Cha
  MOD_RES (10)..(10): Igl
  MOD_RES (13)..(13): Oic
  MOD_RES (14)..(14): Nle
  MOD_RES (16)..(16): 4-Cl-F
FRRQRPRASGKGXLPF

SEQ ID NO: 422 - protein, 16 aa, Artificial Sequence
  source: /note="Description of Artificial Sequence: Synthetic peptide"
  source: /note="N-term MeS-Propionyl"
  MOD_RES (2)..(3): hArg
  MOD_RES (5)..(5): hArg
  MOD_RES (7)..(7): hArg
  MOD_RES (8)..(8): Cha
  MOD_RES (10)..(10): 4-Cl-F
  MOD_RES (13)..(13): Oic
  MOD_RES (14)..(14): Nle
  MOD_RES (16)..(16): 4-Cl-F
FRRQRPRASFKGXLPF

SEQ ID NO: 423 - protein, 16 aa, Artificial Sequence
  source: /note="Description of Artificial Sequence: Synthetic peptide"
  source: /note="N-term MeS-Propionyl"
  MOD_RES (2)..(3): hArg
  MOD_RES (5)..(5): hArg
  MOD_RES (7)..(7): hArg
  MOD_RES (8)..(8): Cha
  MOD_RES (10)..(10): 4-F-F
  MOD_RES (13)..(13): Oic
  MOD_RES (14)..(14): Nle
  MOD_RES (16)..(16): 4-Cl-F
FRRQRPRASFKGXLPF

SEQ ID NO: 424 - protein, 16 aa, Artificial Sequence
  source: /note="Description of Artificial Sequence: Synthetic peptide"
  source: /note="N-term MeS-Propionyl"
  MOD_RES (2)..(3): hArg
  MOD_RES (5)..(5): hArg
  MOD_RES (7)..(7): hArg
  MOD_RES (8)..(8): Cha
  MOD_RES (10)..(10): 4-I-F
  MOD_RES (13)..(13): Oic
  MOD_RES (14)..(14): Nle
  MOD_RES (16)..(16): 4-Cl-F
FRRQRPRASFKGXLPF

SEQ ID NO: 425 - protein, 16 aa, Artificial Sequence
  source: /note="Description of Artificial Sequence: Synthetic peptide"
  source: /note="N-term MeS-Propionyl"
  MOD_RES (2)..(3): hArg
  MOD_RES (5)..(5): hArg
  MOD_RES (7)..(7): hArg
  MOD_RES (8)..(8): Cha
  MOD_RES (10)..(10): 2Pal
  MOD_RES (13)..(13): Oic
  MOD_RES (14)..(14): Nle
  MOD_RES (16)..(16): 4-Cl-F
FRRQRPRASAKGXLPF

SEQ ID NO: 426 - protein, 16 aa, Artificial Sequence
  source: /note="Description of Artificial Sequence: Synthetic peptide"
  source: /note="N-term MeS-Propionyl"
  MOD_RES (2)..(3): hArg
  MOD_RES (5)..(5): hArg
  MOD_RES (7)..(7): hArg
  MOD_RES (8)..(8): Cha
  MOD_RES (10)..(10): 3Pal
  MOD_RES (13)..(13): Oic
  MOD_RES (14)..(14): Nle
  MOD_RES (16)..(16): 4-Cl-F
FRRQRPRASAKGXLPF

SEQ ID NO: 427 - protein, 16 aa, Artificial Sequence
  source: /note="Description of Artificial Sequence: Synthetic peptide"
  source: /note="N-term MeS-Propionyl"
  MOD_RES (2)..(3): hArg
  MOD_RES (5)..(5): hArg
  MOD_RES (7)..(7): hArg
  MOD_RES (8)..(8): Cha
  MOD_RES (10)..(10): Tic
  MOD_RES (13)..(13): Oic
  MOD_RES (14)..(14): Nle
  MOD_RES (16)..(16): 4-Cl-F
FRRQRPRASXKGXLPF

SEQ ID NO: 428 - protein, 16 aa, Artificial Sequence
  source: /note="Description of Artificial Sequence: Synthetic peptide"
  source: /note="N-term MeS-Propionyl"
  MOD_RES (2)..(3): hArg
  MOD_RES (5)..(5): hArg
  MOD_RES (7)..(7): hArg
  MOD_RES (8)..(8): Cha
  MOD_RES (10)..(10): Orn
  MOD_RES (13)..(13): Oic
  MOD_RES (14)..(14): Nle
  MOD_RES (16)..(16): 4-Cl-F
FRRQRPRASXKGXLPF

SEQ ID NO: 429 - protein, 16 aa, Artificial Sequence
  source: /note="Description of Artificial Sequence: Synthetic peptide"
  source: /note="N-term MeS-Propionyl"
  MOD_RES (2)..(3): hArg
  MOD_RES (5)..(5): hArg
  MOD_RES (7)..(7): hArg
  MOD_RES (8)..(8): Cha
  MOD_RES (10)..(10): Dab
  MOD_RES (13)..(13): Oic
  MOD_RES (14)..(14): Nle
  MOD_RES (16)..(16): 4-Cl-F
FRRQRPRASXKGXLPF

SEQ ID NO: 430 - protein, 16 aa, Artificial Sequence
  source: /note="Description of Artificial Sequence: Synthetic peptide"
  source: /note="N-term MeS-Propionyl"
  MOD_RES (2)..(3): hArg
  MOD_RES (5)..(5): hArg
  MOD_RES (7)..(7): hArg
  MOD_RES (8)..(8): Cha
  MOD_RES (10)..(10): Dap
  MOD_RES (13)..(13): Oic
  MOD_RES (14)..(14): Nle
  MOD_RES (16)..(16): 4-Cl-F
FRRQRPRASXKGXLPF

SEQ ID NO: 431 - protein, 16 aa, Artificial Sequence
  source: /note="Description of Artificial Sequence: Synthetic peptide"
  source: /note="N-term Acetyl"
  MOD_RES (1)..(1): Atz(PEG10)
  MOD_RES (7)..(7): hArg
  MOD_RES (8)..(8): NMeLeu
  MOD_RES (14)..(14): Nle
  MOD_RES (16)..(16): 4-Cl-F
AGGLRPRLSHKGPLPF

SEQ ID NO: 432 - protein, 15 aa, Artificial Sequence
  source: /note="Description of Artificial Sequence: Synthetic peptide"
  source: /note="N-term Acetyl"
  MOD_RES (1)..(1): Atz(PEG10)
  MOD_RES (6)..(6): hArg
  MOD_RES (7)..(7): NMeLeu
  MOD_RES (13)..(13): Nle
  MOD_RES (15)..(15): 4-Cl-F
AGLRPRLSHKGPLPF

SEQ ID NO: 433 - protein, 14 aa, Artificial Sequence
  source: /note="Description of Artificial Sequence: Synthetic peptide"
  source: /note="N-term Acetyl"
  MOD_RES (1)..(1): Atz(PEG10)
  MOD_RES (5)..(5): hArg
  MOD_RES (6)..(6): NMeLeu
  MOD_RES (12)..(12): Nle
  MOD_RES (14)..(14): 4-Cl-F
ALRPRLSHKGPLPF

SEQ ID NO: 434 - protein, 13 aa, Artificial Sequence
  source: /note="Description of Artificial Sequence: Synthetic peptide"
  MOD_RES (1)..(1): PyroGlu
  MOD_RES (2)..(2): Atz(PEG10)
  MOD_RES (4)..(4): hArg
  MOD_RES (5)..(5): NMeLeu
  MOD_RES (11)..(11): Nle
  MOD_RES (13)..(13): 4-Cl-F
EAPRLSHKGPLPF

SEQ ID NO: 435 - protein, 13 aa, Artificial Sequence
  source: /note="Description of Artificial Sequence: Synthetic peptide"
  MOD_RES (1)..(1): PyroGlu
  MOD_RES (4)..(4): Atz(PEG10)
  MOD_RES (5)..(5): NMeLeu
  MOD_RES (11)..(11): Nle
  MOD_RES (13)..(13): 4-Cl-F
ERPALSHKGPLPF

SEQ ID NO: 436 - protein, 13 aa, Artificial Sequence
  source: /note="Description of Artificial Sequence: Synthetic peptide"
  MOD_RES (1)..(1): PyroGlu
  MOD_RES (4)..(4): hArg
  MOD_RES (5)..(5): Atz(PEG10)
  MOD_RES (11)..(11): Nle
  MOD_RES (13)..(13): 4-Cl-F
ERPRASHKGPLPF

SEQ ID NO: 437 - protein, 13 aa, Artificial Sequence
  source: /note="Description of Artificial Sequence: Synthetic peptide"
  MOD_RES (1)..(1): PyroGlu
  MOD_RES (4)..(4): hArg
  MOD_RES (5)..(5): NMeLeu
  MOD_RES (6)..(6): Atz(PEG10)
  MOD_RES (11)..(11): Nle
  MOD_RES (13)..(13): 4-Cl-F
ERPRLAHKGPLPF

SEQ ID NO: 438 - protein, 13 aa, Artificial Sequence
  source: /note="Description of Artificial Sequence: Synthetic peptide"
  MOD_RES (1)..(1): PyroGlu
  MOD_RES (4)..(4): hArg
  MOD_RES (5)..(5): NMeLeu
  MOD_RES (7)..(7): Atz(PEG10)
  MOD_RES (11)..(11): Nle
  MOD_RES (13)..(13): 4-Cl-F
ERPRLSAKGPLPF

SEQ ID NO: 439 - protein, 13 aa, Artificial Sequence
  source: /note="Description of Artificial Sequence: Synthetic peptide"
  MOD_RES (1)..(1): PyroGlu
  MOD_RES (4)..(4): hArg
  MOD_RES (5)..(5): NMeLeu
  MOD_RES (11)..(11): Atz(PEG10)
  MOD_RES (13)..(13): 4-Cl-F
ERPRLSHKGPAPF

SEQ ID NO: 440 - protein, 13 aa, Artificial Sequence
  source: /note="Description of Artificial Sequence: Synthetic peptide"
  MOD_RES (1)..(1): PyroGlu
  MOD_RES (4)..(4): hArg
  MOD_RES (5)..(5): NMeLeu
  MOD_RES (11)..(11): Nle
  MOD_RES (13)..(13): Atz(PEG10)
  source: /note="C-term Amide"
ERPRLSHKGPLPA

SEQ ID NO: 441 - protein, 14 aa, Artificial Sequence
  source: /note="Description of Artificial Sequence: Synthetic peptide"
  MOD_RES (1)..(1): PyroGlu
  MOD_RES (4)..(4): hArg
  MOD_RES (5)..(5): NMeLeu
  MOD_RES (11)..(11): Nle
  MOD_RES (13)..(13): 4-Cl-F
  MOD_RES (14)..(14): Atz(PEG10)
  source: /note="C-term Amide"
ERPRLSHKGPLPFA

SEQ ID NO: 442 - protein, 15 aa, Artificial Sequence
  source: /note="Description of Artificial Sequence: Synthetic peptide"
  MOD_RES (1)..(1): PyroGlu
  MOD_RES (4)..(4): hArg
  MOD_RES (5)..(5): NMeLeu
  MOD_RES (11)..(11): Nle
  MOD_RES (13)..(13): 4-Cl-F
  MOD_RES (15)..(15): Atz(PEG10)
  source: /note="C-term Amide"
ERPRLSHKGPLPFGA

SEQ ID NO: 443 - protein, 16 aa, Artificial Sequence
  source: /note="Description of Artificial Sequence: Synthetic peptide"
  MOD_RES (1)..(1): PyroGlu
  MOD_RES (4)..(4): hArg
  MOD_RES (5)..(5): NMeLeu
  MOD_RES (11)..(11): Nle
  MOD_RES (13)..(13): 4-Cl-F
  MOD_RES (16)..(16): Atz(PEG10)
  source: /note="C-term Amide"
ERPRLSHKGPLPFGGA

SEQ ID NO: 444 - protein, 14 aa, Artificial Sequence
  source: /note="Description of Artificial Sequence: Synthetic peptide"
  source: /note="N-term Acetyl"
  MOD_RES (1)..(1): Atz(PEG10)
  MOD_RES (5)..(5): hArg
  MOD_RES (6)..(6): NMeLeu
  MOD_RES (7)..(7): Atz(PEG10)
  MOD_RES (12)..(12): Nle
  MOD_RES (14)..(14): 4-Cl-F
ALRPRLAHKGPLPF

SEQ ID NO: 445 - protein, 13 aa, Artificial Sequence
  source: /note="Description of Artificial Sequence: Synthetic peptide"
  MOD_RES (1)..(1): PyroGlu
  MOD_RES (4)..(4): hArg
  MOD_RES (5)..(5): Cha
  MOD_RES (6)..(6): Atz(PEG10)
  MOD_RES (11)..(11): Nle
  MOD_RES (13)..(13): 4-Cl-F
ERPRAAHKGPLPF

SEQ ID NO: 446 - protein, 13 aa, Artificial Sequence
  source: /note="Description of Artificial Sequence: Synthetic peptide"
  MOD_RES (1)..(1): PyroGlu
  MOD_RES (4)..(4): hArg
  MOD_RES (5)..(5): Cha
  MOD_RES (6)..(6): Atz(PEG10)
  MOD_RES (10)..(10): Oic
  MOD_RES (11)..(11): Nle
  MOD_RES (13)..(13): 4-Cl-F
ERPRAAHKGXLPF

SEQ ID NO: 447 - protein, 13 aa, Artificial Sequence
  source: /note="Description of Artificial Sequence: Synthetic peptide"
  MOD_RES (1)..(1): PyroGlu
  MOD_RES (4)..(4): hArg
  MOD_RES (5)..(5): Cha
  MOD_RES (6)..(6): Atz(PEG10)
  MOD_RES (10)..(10): Oic
  MOD_RES (11)..(11): Nle
  MOD_RES (13)..(13): 4-Cl-F
  source: /note="C-term Amide"
ERPRAAHKGXLPF

SEQ ID NO: 448 - protein, 13 aa, Artificial Sequence
  source: /note="Description of Artificial Sequence: Synthetic peptide"
  MOD_RES (1)..(1): PyroGlu
  MOD_RES (4)..(4): hArg
  MOD_RES (5)..(5): NMeLeu
  MOD_RES (6)..(6): Atz(PEG10)
  MOD_RES (11)..(11): Nle
  MOD_RES (13)..(13): 4-Cl-F
ERPRLAHKGPLPF

SEQ ID NO: 449 - protein, 13 aa, Artificial Sequence
  source: /note="Description of Artificial Sequence: Synthetic peptide"
  MOD_RES (1)..(1): PyroGlu
  MOD_RES (4)..(4): hArg
  MOD_RES (5)..(5): NMeLeu
  MOD_RES (6)..(6): Atz(PEG10)
  MOD_RES (10)..(10): Oic
  MOD_RES (11)..(11): Nle
  MOD_RES (13)..(13): 4-Cl-F
ERPRLAHKGXLPF

SEQ ID NO: 450 - protein, 13 aa, Artificial Sequence
  source: /note="Description of Artificial Sequence: Synthetic peptide"
  MOD_RES (1)..(1): PyroGlu
  MOD_RES (4)..(4): hArg
  MOD_RES (5)..(5): NMeLeu
  MOD_RES (6)..(6): Atz(PEG10)
  MOD_RES (10)..(10): Oic
  MOD_RES (11)..(11): Nle
  MOD_RES (13)..(13): 4-Cl-F
  source: /note="C-term Amide"
ERPRLAHKGXLPF

SEQ ID NO: 451 - protein, 13 aa, Artificial Sequence
  source: /note="Description of Artificial Sequence: Synthetic peptide"
  MOD_RES (1)..(1): PyroGlu
  MOD_RES (4)..(4): hArg
  MOD_RES (5)..(5): Cha
  MOD_RES (6)..(6): Atz(1K-mPEG)
  MOD_RES (10)..(10): Oic
  MOD_RES (11)..(11): Nle
  MOD_RES (13)..(13): 4-Cl-F
ERPRAAHKGXLPF

SEQ ID NO: 452 - protein, 13 aa, Artificial Sequence
  source: /note="Description of Artificial Sequence: Synthetic peptide"
  MOD_RES (1)..(1): PyroGlu
  MOD_RES (4)..(4): hArg
  MOD_RES (5)..(5): Cha
  MOD_RES (6)..(6): Atz(2K-mPEG)
  MOD_RES (10)..(10): Oic
  MOD_RES (11)..(11): Nle
  MOD_RES (13)..(13): 4-Cl-F
ERPRAAHKGXLPF

SEQ ID NO: 453 - protein, 13 aa, Artificial Sequence
  source: /note="Description of Artificial Sequence: Synthetic peptide"
  MOD_RES (1)..(1): PyroGlu
  MOD_RES (4)..(4): hArg
  MOD_RES (5)..(5): Cha
  MOD_RES (6)..(6): Atz(5K-mPEG)
  MOD_RES (10)..(10): Oic
  MOD_RES (11)..(11): Nle
  MOD_RES (13)..(13): 4-Cl-F
ERPRAAHKGXLPF

SEQ ID NO: 454 - protein, 13 aa, Artificial Sequence
  source: /note="Description of Artificial Sequence: Synthetic peptide"
  MOD_RES (1)..(1): PyroGlu
  MOD_RES (4)..(4): hArg
  MOD_RES (5)..(5): Cha
  MOD_RES (6)..(6): Atz(10K-mPEG)
  MOD_RES (10)..(10): Oic
  MOD_RES (11)..(11): Nle
  MOD_RES (13)..(13): 4-Cl-F
ERPRAAHKGXLPF

SEQ ID NO: 455 - protein, 13 aa, Artificial Sequence
  source: /note="Description of Artificial Sequence: Synthetic peptide"
  MOD_RES (1)..(1): PyroGlu
  MOD_RES (12)..(12): 1-Nal
ERPRLFHKGPFAF

SEQ ID NO: 456 - protein, 13 aa, Artificial Sequence
  source: /note="Description of Artificial Sequence: Synthetic peptide"
  MOD_RES (1)..(1): PyroGlu
  MOD_RES (4)..(4): hArg
  MOD_RES (5)..(5): Cha
  MOD_RES (6)..(6): Atz(20K-mPEG)
  MOD_RES (10)..(10): Oic
  MOD_RES (11)..(11): Nle
  MOD_RES (13)..(13): 4-Cl-F
ERPRAAHKGXLPF

SEQ ID NO: 457 - protein, 13 aa, Artificial Sequence
  source: /note="Description of Artificial Sequence: Synthetic peptide"
  MOD_RES (1)..(1): PyroGlu
  MOD_RES (4)..(4): hArg
  MOD_RES (5)..(5): NMeLeu
  MOD_RES (6)..(6): Atz(20K-mPEG)
  MOD_RES (10)..(10): Oic
  MOD_RES (11)..(11): Nle
  MOD_RES (13)..(13): 4-Cl-F
ERPRLAHKGXLPF

SEQ ID NO: 458 - protein, 13 aa, Artificial Sequence
  source: /note="Description of Artificial Sequence: Synthetic peptide"
  MOD_RES (1)..(1): PyroGlu
  MOD_RES (4)..(4): hArg
  MOD_RES (5)..(5): Cha
  MOD_RES (7)..(7): Atz(1K-mPEG)
  MOD_RES (10)..(10): Oic
  MOD_RES (11)..(11): Nle
  MOD_RES (13)..(13): 4-Cl-F
ERPRASAKGXLPF

SEQ ID NO: 459 - protein, 13 aa, Artificial Sequence
  source: /note="Description of Artificial Sequence: Synthetic peptide"
  MOD_RES (1)..(1): PyroGlu
  MOD_RES (4)..(4): hArg
  MOD_RES (5)..(5): Cha
  MOD_RES (7)..(7): Atz(2K-mPEG)
  MOD_RES (10)..(10): Oic
  MOD_RES (11)..(11): Nle
  MOD_RES (13)..(13): 4-Cl-F
ERPRASAKGXLPF

SEQ ID NO: 460 - protein, 13 aa, Artificial Sequence
  source: /note="Description of Artificial Sequence: Synthetic peptide"
  MOD_RES (1)..(1): PyroGlu
  MOD_RES (4)..(4): hArg
  MOD_RES (5)..(5): Cha
  MOD_RES (7)..(7): Atz(5K-mPEG)
  MOD_RES (10)..(10): Oic
  MOD_RES (11)..(11): Nle
  MOD_RES (13)..(13): 4-Cl-F
ERPRASAKGXLPF

SEQ ID NO: 461 - protein, 13 aa, Artificial Sequence
  source: /note="Description of Artificial Sequence: Synthetic peptide"
  MOD_RES (1)..(1): PyroGlu
  MOD_RES (4)..(4): hArg
  MOD_RES (5)..(5): Cha
  MOD_RES (7)..(7): Atz(10K-mPEG)
  MOD_RES (10)..(10): Oic
  MOD_RES (11)..(11): Nle
  MOD_RES (13)..(13): 4-Cl-F
ERPRASAKGXLPF

SEQ ID NO: 462 - protein, 13 aa, Artificial Sequence
  source: /note="Description of Artificial Sequence: Synthetic peptide"
  MOD_RES (1)..(1): PyroGlu
  MOD_RES (4)..(4): hArg
  MOD_RES (5)..(5): Cha
  MOD_RES (7)..(7): Atz(20K-mPEG)
  MOD_RES (10)..(10): Oic
  MOD_RES (11)..(11): Nle
  MOD_RES (13)..(13): 4-Cl-F
ERPRASAKGXLPF

SEQ ID NO: 463 - protein, 14 aa, Artificial Sequence
  source: /note="Description of Artificial Sequence: Synthetic peptide"
  source: /note="N-term Acetyl"
  MOD_RES (1)..(1): Atz(20K-mPEG)
  MOD_RES (5)..(5): hArg
  MOD_RES (6)..(6): NMeLeu
  MOD_RES (7)..(7): Atz(20K-mPEG)
  MOD_RES (12)..(12): Nle
  MOD_RES (14)..(14): 4-Cl-F
ALRPRLAHKGPLPF

SEQ ID NO: 464 - protein, 14 aa, Artificial Sequence
  source: /note="Description of Artificial Sequence: Synthetic peptide"
  MOD_RES (1)..(1): PyroGlu
  MOD_RES (4)..(4): hArg
  MOD_RES (5)..(5): NMeLeu
  MOD_RES (11)..(11): Nle
  MOD_RES (13)..(13): D-Bip
  MOD_RES (14)..(14): K(Ac-Atz(20K-mPEG))
  source: /note="C-term Amide"
ERPRLSHKGPLPFK

SEQ ID NO: 465 - protein, 14 aa, Artificial Sequence
  source: /note="Description of Artificial Sequence: Synthetic peptide"
  source: /note="N-term Acetyl"
  MOD_RES (1)..(1): Atz(1K-mPEG)
  MOD_RES (5)..(5): hArg
  MOD_RES (6)..(6): Cha
  MOD_RES (11)..(11): Oic
  MOD_RES (12)..(12): Nle
  MOD_RES (14)..(14): 4-Cl-F
ALRPRASHKGXLPF

SEQ ID NO: 466 - protein, 14 aa, Artificial Sequence
  source: /note="Description of Artificial Sequence: Synthetic peptide"
  source: /note="N-term Acetyl"
  MOD_RES (1)..(1): Atz(2K-mPEG)
  MOD_RES (5)..(5): hArg
  MOD_RES (6)..(6): Cha
  MOD_RES (11)..(11): Oic
  MOD_RES (12)..(12): Nle
  MOD_RES (14)..(14): 4-Cl-F
ALRPRASHKGXLPF

SEQ ID NO: 467 - protein, 14 aa, Artificial Sequence
  source: /note="Description of Artificial Sequence: Synthetic peptide"
  source: /note="N-term Acetyl"
  MOD_RES (1)..(1): Atz(5K-mPEG)
  MOD_RES (5)..(5): hArg
  MOD_RES (6)..(6): Cha
  MOD_RES (11)..(11): Oic
  MOD_RES (12)..(12): Nle
  MOD_RES (14)..(14): 4-Cl-F
ALRPRASHKGXLPF

SEQ ID NO: 468 - protein, 14 aa, Artificial Sequence
  source: /note="Description of Artificial Sequence: Synthetic peptide"
  source: /note="N-term Acetyl"
  MOD_RES (1)..(1): Atz(10K-mPEG)
  MOD_RES (5)..(5): hArg
  MOD_RES (6)..(6): Cha
  MOD_RES (11)..(11): Oic
  MOD_RES (12)..(12): Nle
  MOD_RES (14)..(14): 4-Cl-F
ALRPRASHKGXLPF

SEQ ID NO: 469 - protein, 14 aa, Artificial Sequence
  source: /note="Description of Artificial Sequence: Synthetic peptide"
  source: /note="N-term Acetyl"
  MOD_RES (1)..(1): Atz(20K-mPEG)
  MOD_RES (5)..(5): hArg
  MOD_RES (6)..(6): Cha
  MOD_RES (11)..(11): Oic
  MOD_RES (12)..(12): Nle
  MOD_RES (14)..(14): 4-Cl-F
ALRPRASHKGXLPF

SEQ ID NO: 470 - protein, 18 aa, Artificial Sequence
  source: /note="Description of Artificial Sequence: Synthetic peptide"
  MOD_RES (1)..(1): Atz(20K-mPEG)
  MOD_RES (9)..(9): hArg
  MOD_RES (10)..(10): Cha
  MOD_RES (15)..(15): Oic
  MOD_RES (16)..(16): Nle
  MOD_RES (18)..(18): 4-Cl-F
AKFRRQRPRASHKGXLPF

SEQ ID NO: 471 - protein, 14 aa, Artificial Sequence
  source: /note="Description of Artificial Sequence: Synthetic peptide"
  MOD_RES (1)..(1): Atz(20K-mPEG)
  MOD_RES (5)..(5): hArg
  MOD_RES (6)..(6): Cha
  MOD_RES (11)..(11): Oic
  MOD_RES (12)..(12): Nle
  MOD_RES (14)..(14): 4-Cl-F
ALRPRASHKGXLPF

SEQ ID NO: 472 - protein, 13 aa, Artificial Sequence
  source: /note="Description of Artificial Sequence: Synthetic peptide"
  source: /note="N-term Thiopropionyl(20K-mPEG)"
  MOD_RES (4)..(4): hArg
  MOD_RES (5)..(5): Cha
  MOD_RES (10)..(10): Oic
  MOD_RES (11)..(11): Nle
  MOD_RES (13)..(13): 4-Cl-F
LRPRASHKGXLPF

SEQ ID NO: 473 - protein, 17 aa, Artificial Sequence
  source: /note="Description of Artificial Sequence: Synthetic peptide"
  source: /note="N-term Thiopropionyl(20K-mPEG)"
  MOD_RES (8)..(8): hArg
  MOD_RES (9)..(9): Cha
  MOD_RES (14)..(14): Oic
  MOD_RES (15)..(15): Nle
  MOD_RES (17)..(17): 4-Cl-F
KFRRQRPRASHKGXLPF

SEQ ID NO: 474 - protein, 17 aa, Artificial Sequence
  source: /note="Description of Artificial Sequence: Synthetic peptide"
  source: /note="N-term Thiopropionyl(40K-mPEG)"
  MOD_RES (8)..(8): hArg
  MOD_RES (9)..(9): Cha
  MOD_RES (14)..(14): Oic
  MOD_RES (15)..(15): Nle
  MOD_RES (17)..(17): 4-Cl-F
KFRRQRPRASHKGXLPF

SEQ ID NO: 475 - protein, 14 aa, Artificial Sequence
  source: /note="Description of Artificial Sequence: Synthetic peptide"
  source: /note="N-term Thiopropionyl(20K-mPEG)"
  MOD_RES (5)..(5): hArg
  MOD_RES (6)..(6): Cha
  MOD_RES (11)..(11): Oic
  MOD_RES (12)..(12): Nle
  MOD_RES (14)..(14): 4-Cl-F
LLRPRASHKGXLPF

SEQ ID NO: 476 - protein, 16 aa, Artificial Sequence
  source: /note="Description of Artificial Sequence: Synthetic peptide"
  source: /note="N-term Thiopropionyl(20K-mPEG)"
  MOD_RES (7)..(7): hArg
  MOD_RES (8)..(8): Cha
  MOD_RES (13)..(13): Oic
  MOD_RES (14)..(14): Nle
  MOD_RES (16)..(16): 4-Cl-F
FRRQRPRASHKGXLPF

SEQ ID NO: 477 - protein, 15 aa, Artificial Sequence
  source: /note="Description of Artificial Sequence: Synthetic peptide"
  source: /note="N-term Thiopropionyl(20K-mPEG)"
  MOD_RES (6)..(6): hArg
  MOD_RES (7)..(7): Cha
  MOD_RES (12)..(12): Oic
  MOD_RES (13)..(13): Nle
  MOD_RES (15)..(15): 4-Cl-F
RRQRPRASHKGXLPF

SEQ ID NO: 478 - protein, 14 aa, Artificial Sequence
  source: /note="Description of Artificial Sequence: Synthetic peptide"
  source: /note="N-term Thiopropionyl(20K-mPEG)"
  MOD_RES (5)..(5): hArg
  MOD_RES (6)..(6): Cha
  MOD_RES (11)..(11): Oic
  MOD_RES (12)..(12): Nle
  MOD_RES (14)..(14): 4-Cl-F
RQRPRASHKGXLPF

SEQ ID NO: 479 - protein, 13 aa, Artificial Sequence
  source: /note="Description of Artificial Sequence: Synthetic peptide"
  source: /note="N-term Thiopropionyl(20K-mPEG)"
  MOD_RES (4)..(4): hArg
  MOD_RES (5)..(5): Cha
  MOD_RES (10)..(10): Oic
  MOD_RES (11)..(11): Nle
  MOD_RES (13)..(13): 4-Cl-F
QRPRASHKGXLPF

SEQ ID NO: 480 - protein, 13 aa, Artificial Sequence
  source: /note="Description of Artificial Sequence: Synthetic peptide"
  source: /note="N-term Thiopropionyl(1K-mPEG)"
  MOD_RES (4)..(4): hArg
  MOD_RES (5)..(5): Cha
  MOD_RES (10)..(10): Oic
  MOD_RES (11)..(11): Nle
  MOD_RES (13)..(13): 4-Cl-F
QRPRASHKGXLPF

SEQ ID NO: 481 - protein, 13 aa, Artificial Sequence
  source: /note="Description of Artificial Sequence: Synthetic peptide"
  source: /note="N-term Thiopropionyl(5K-mPEG)"
  MOD_RES (4)..(4): hArg
  MOD_RES (5)..(5): Cha
  MOD_RES (10)..(10): Oic
  MOD_RES (11)..(11): Nle
  MOD_RES (13)..(13): 4-Cl-F
QRPRASHKGXLPF

SEQ ID NO: 482 - protein, 13 aa, Artificial Sequence
  source: /note="Description of Artificial Sequence: Synthetic peptide"
  source: /note="N-term Thiopropionyl(10K-mPEG)"
  MOD_RES (4)..(4): hArg
  MOD_RES (5)..(5): Cha
  MOD_RES (10)..(10): Oic
  MOD_RES (11)..(11): Nle
  MOD_RES (13)..(13): 4-Cl-F
QRPRASHKGXLPF

SEQ ID NO: 483 - protein, 13 aa, Artificial Sequence
  source: /note="Description of Artificial Sequence: Synthetic peptide"
  source: /note="N-term Thiopropionyl(2K-mPEG)"
  MOD_RES (4)..(4): hArg
  MOD_RES (5)..(5): Cha
  MOD_RES (10)..(10): Oic
  MOD_RES (11)..(11): Nle
  MOD_RES (13)..(13): 4-Cl-F
QRPRASHKGXLPF

SEQ ID NO: 484 - protein, 13 aa, Artificial Sequence
  source: /note="Description of Artificial Sequence: Synthetic peptide"
  source: /note="N-term Thiopropionyl(40K-mPEG)"
  MOD_RES (4)..(4): hArg
  MOD_RES (5)..(5): Cha
  MOD_RES (10)..(10): Oic
  MOD_RES (11)..(11): Nle
  MOD_RES (13)..(13): 4-Cl-F
QRPRASHKGXLPF

SEQ ID NO: 485 - protein, 17 aa, Artificial Sequence
  source: /note="Description of Artificial Sequence: Synthetic peptide"
  source: /note="N-term Thiopropionyl(1K-mPEG)"
  MOD_RES (8)..(8): hArg
  MOD_RES (9)..(9): Cha
  MOD_RES (14)..(14): Oic
  MOD_RES (15)..(15): Nle
  MOD_RES (17)..(17): 4-Cl-F
KFRRQRPRASHKGXLPF

SEQ ID NO: 486 - protein, 17 aa, Artificial Sequence
  source: /note="Description of Artificial Sequence: Synthetic peptide"
  source: /note="N-term Thiopropionyl(2K-mPEG)"
  MOD_RES (8)..(8): hArg
  MOD_RES (9)..(9): Cha
  MOD_RES (14)..(14): Oic
  MOD_RES (15)..(15): Nle
  MOD_RES (17)..(17): 4-Cl-F
KFRRQRPRASHKGXLPF

SEQ ID NO: 487 - protein, 17 aa, Artificial Sequence
  source: /note="Description of Artificial Sequence: Synthetic peptide"
  source: /note="N-term Thiopropionyl(5K-mPEG)"
  MOD_RES (8)..(8): hArg
  MOD_RES (9)..(9): Cha
  MOD_RES (14)..(14): Oic
  MOD_RES (15)..(15): Nle
  MOD_RES (17)..(17): 4-Cl-F
KFRRQRPRASHKGXLPF

SEQ ID NO: 488 - protein, 17 aa, Artificial Sequence
  source: /note="Description of Artificial Sequence: Synthetic peptide"
  source: /note="N-term Thiopropionyl(10K-mPEG)"
  MOD_RES (8)..(8): hArg
  MOD_RES (9)..(9): Cha
  MOD_RES (14)..(14): Oic
  MOD_RES (15)..(15): Nle
  MOD_RES (17)..(17): 4-Cl-F
KFRRQRPRASHKGXLPF

SEQ ID NO: 489 - protein, 17 aa, Artificial Sequence
  source: /note="Description of Artificial Sequence: Synthetic peptide"
  source: /note="N-term Thiopropionyl(40K-mPEG)"
  MOD_RES (8)..(8): hArg
  MOD_RES (9)..(9): Cha
  MOD_RES (14)..(14): Oic
  MOD_RES (15)..(15): Nle
  MOD_RES (17)..(17): 4-Cl-F
KFRRQRPRASHKGXLPF

SEQ ID NO: 490 - protein, 16 aa, Artificial Sequence
  source: /note="Description of Artificial Sequence: Synthetic peptide"
  source: /note="N-term Thiopropionyl(20K-mPEG)"
  MOD_RES (2)..(3): hArg
  MOD_RES (5)..(5): hArg
  MOD_RES (7)..(7): hArg
  MOD_RES (8)..(8): Cha
  MOD_RES (13)..(13): Oic
  MOD_RES (14)..(14): Nle
  MOD_RES (16)..(16): 4-Cl-F
FRRQRPRASHKGXLPF

SEQ ID NO: 491 - protein, 17 aa, Artificial Sequence
  source: /note="Description of Artificial Sequence: Synthetic peptide"
  source: /note="N-term Thiopropionyl(20K-mPEG)"
  MOD_RES (1)..(1): Orn
  MOD_RES (3)..(4): hArg
  MOD_RES (6)..(6): hArg
  MOD_RES (8)..(8): hArg
  MOD_RES (9)..(9): Cha
  MOD_RES (14)..(14): Oic
  MOD_RES (15)..(15): Nle
  MOD_RES (17)..(17): 4-Cl-F
XFRRQRPRASHKGXLPF

SEQ ID NO: 492 - protein, 17 aa, Artificial Sequence
  source: /note="Description of Artificial Sequence: Synthetic peptide"
  source: /note="N-term Thiopropionyl(20K-mPEG)"
  MOD_RES (1)..(1): Orn
  MOD_RES (3)..(4): hArg
  MOD_RES (6)..(6): Cit
  MOD_RES (8)..(8): hArg
  MOD_RES (9)..(9): Cha
  MOD_RES (14)..(14): Oic
  MOD_RES (15)..(15): Nle
  MOD_RES (17)..(17): 4-Cl-F
XFRRQXPRASHKGXLPF

SEQ ID NO: 493 - protein, 16 aa, Artificial Sequence
  source: /note="Description of Artificial Sequence: Synthetic peptide"
  source: /note="N-term Thiopropionyl(20K-mPEG)"
  MOD_RES (2)..(3): hArg
  MOD_RES (5)..(5): Cit
  MOD_RES (7)..(7): hArg
  MOD_RES (8)..(8): Cha
  MOD_RES (13)..(13): Oic
  MOD_RES (14)..(14): Nle
  MOD_RES (16)..(16): 4-Cl-F
FRRQXPRASHKGXLPF

SEQ ID NO: 494 - protein, 16 aa, Artificial Sequence
  source: /note="Description of Artificial Sequence: Synthetic peptide"
  source: /note="N-term Thiopropionyl(20K-mPEG)"
  MOD_RES (2)..(3): Cit
  MOD_RES (5)..(5): hArg
  MOD_RES (7)..(7): hArg
  MOD_RES (8)..(8): Cha
  MOD_RES (13)..(13): Oic
  MOD_RES (14)..(14): Nle
  MOD_RES (16)..(16): 4-Cl-F
FXXQRPRASHKGXLPF

SEQ ID NO: 495 - protein, 17 aa, Artificial Sequence
  source: /note="Description of Artificial Sequence: Synthetic peptide"
  source: /note="N-term NPEG11"
  MOD_RES (8)..(8): hArg
  MOD_RES (9)..(9): Cha
  MOD_RES (14)..(14): Oic
  MOD_RES (15)..(15): Nle
  MOD_RES (17)..(17): 4-Cl-F
KFRRQRPRASHKGXLPF

SEQ ID NO: 496 - protein, 18 aa, Artificial Sequence
  source: /note="Description of Artificial Sequence: Synthetic peptide"
  MOD_RES (1)..(1): Atz(PEG10)
  MOD_RES (9)..(9): hArg
  MOD_RES (10)..(10): Cha
  MOD_RES (15)..(15): Oic
  MOD_RES (16)..(16): Nle
  MOD_RES (18)..(18): 4-Cl-F
AKFRRQRPRASHKGXLPF

SEQ ID NO: 497 - protein, 18 aa, Artificial Sequence
  source: /note="Description of Artificial Sequence: Synthetic peptide"
  MOD_RES (1)..(1): Atz(PEG10)
  MOD_RES (4)..(5): hArg
  MOD_RES (9)..(9): hArg
  MOD_RES (10)..(10): Cha
  MOD_RES (15)..(15): Oic
  MOD_RES (16)..(16): Nle
  MOD_RES (18)..(18): 4-Cl-F
AKFRRQRPRASHKGXLPF

SEQ ID NO: 498 - protein, 18 aa, Artificial Sequence
  source: /note="Description of Artificial Sequence: Synthetic peptide"
  MOD_RES (1)..(1): Atz(PEG10)
  MOD_RES (4)..(5): hArg
  MOD_RES (7)..(7): hArg
  MOD_RES (9)..(9): hArg
  MOD_RES (10)..(10): Cha
  MOD_RES (15)..(15): Oic
  MOD_RES (16)..(16): Nle
  MOD_RES (18)..(18): 4-Cl-F
AKFRRQRPRASHKGXLPF

SEQ ID NO: 499 - protein, 18 aa, Artificial Sequence
  source: /note="Description of Artificial Sequence: Synthetic peptide"
  MOD_RES (1)..(1): Atz(PEG10)
  MOD_RES (4)..(5): hArg
  MOD_RES (9)..(9): hArg
  MOD_RES (10)..(10): Cha
  MOD_RES (15)..(15): Oic
  MOD_RES (16)..(16): Nle
  MOD_RES (18)..(18): 4-Cl-F
AKFRRQQPRASHKGXLPF

SEQ ID NO: 500 - protein, 18 aa, Artificial Sequence
  source: /note="Description of Artificial Sequence: Synthetic peptide"
  MOD_RES (1)..(1): Atz(PEG10)
  MOD_RES (4)..(5): hArg
  MOD_RES (7)..(7): Cit
  MOD_RES (9)..(9): hArg
  MOD_RES (10)..(10): Cha
  MOD_RES (15)..(15): Oic
  MOD_RES (16)..(16): Nle
  MOD_RES (18)..(18): 4-Cl-F
AKFRRQXPRASHKGXLPF

SEQ ID NO: 501 - protein, 18 aa, Artificial Sequence
  source: /note="Description of Artificial Sequence: Synthetic peptide"
  MOD_RES (1)..(1): Atz(PEG10)
  MOD_RES (4)..(4): hArg
  MOD_RES (5)..(5): Cit
  MOD_RES (7)..(7): Cit
  MOD_RES (9)..(9): hArg
  MOD_RES (10)..(10): Cha
  MOD_RES (15)..(15): Oic
  MOD_RES (16)..(16): Nle
  MOD_RES (18)..(18): 4-Cl-F
AKFRXQXPRASHKGXLPF

SEQ ID NO: 502 - protein, 18 aa, Artificial Sequence
  source: /note="Description of Artificial Sequence: Synthetic peptide"
  MOD_RES (1)..(1): Atz(PEG10)
  MOD_RES (4)..(5): Cit
  MOD_RES (7)..(7): hArg
  MOD_RES (9)..(9): hArg
  MOD_RES (10)..(10): Cha
  MOD_RES (15)..(15): Oic
  MOD_RES (16)..(16): Nle
  MOD_RES (18)..(18): 4-Cl-F
AKFXXQRPRASHKGXLPF

SEQ ID NO: 503 - protein, 18 aa, Artificial Sequence
  source: /note="Description of Artificial Sequence: Synthetic peptide"
  MOD_RES (1)..(1): Atz(PEG10)
  MOD_RES (4)..(5): Cit
  MOD_RES (7)..(7): Cit
  MOD_RES (9)..(9): hArg
  MOD_RES (10)..(10): Cha
  MOD_RES (15)..(15): Oic
  MOD_RES (16)..(16): Nle
  MOD_RES (18)..(18): 4-Cl-F
AKFXXQXPRASHKGXLPF

SEQ ID NO: 504 - protein, 18 aa, Artificial Sequence
  source: /note="Description of Artificial Sequence: Synthetic peptide"
  MOD_RES (1)..(1): Atz(PEG10)
  MOD_RES (2)..(2): Orn
  MOD_RES (9)..(9): hArg
  MOD_RES (10)..(10): Cha
  MOD_RES (15)..(15): Oic
  MOD_RES (16)..(16): Nle
  MOD_RES (18)..(18): 4-Cl-F
AXFRRQRPRASHKGXLPF

SEQ ID NO: 505 - protein, 18 aa, Artificial Sequence
  source: /note="Description of Artificial Sequence: Synthetic peptide"
  MOD_RES (1)..(1): Atz(PEG10)
  MOD_RES (2)..(2): Orn
  MOD_RES (4)..(5): hArg
  MOD_RES (7)..(7): hArg
  MOD_RES (9)..(9): hArg
  MOD_RES (10)..(10): Cha
  MOD_RES (15)..(15): Oic
  MOD_RES (16)..(16): Nle
  MOD_RES (18)..(18): 4-Cl-F
AXFRRQRPRASHKGXLPF

SEQ ID NO: 506 - protein, 17 aa, Artificial Sequence
  source: /note="Description of Artificial Sequence: Synthetic peptide"
  MOD_RES (1)..(1): Atz(PEG10)
  MOD_RES (8)..(8): hArg
  MOD_RES (9)..(9): Cha
  MOD_RES (14)..(14): Oic
  MOD_RES (15)..(15): Nle
  MOD_RES (17)..(17): 4-Cl-F
AFRRQRPRASHKGXLPF

SEQ ID NO: 507 - protein, 14 aa, Artificial Sequence
  source: /note="Description of Artificial Sequence: Synthetic peptide"
  MOD_RES (1)..(1): Atz(PEG10)
  MOD_RES (5)..(5): hArg
  MOD_RES (6)..(6): Cha
  MOD_RES (11)..(11): Oic
  MOD_RES (12)..(12): Nle
  MOD_RES (14)..(14): 4-Cl-F
ALRPRASHKGXLPF

SEQ ID NO: 508 - protein, 13 aa, Artificial Sequence
  source: /note="Description of Artificial Sequence: Synthetic peptide"
  MOD_RES (1)..(1): PyroGlu
  MOD_RES (4)..(4): hArg
  MOD_RES (5)..(5): NMeLeu
ERPRLFHKPPFPF

SEQ ID NO: 509 - protein, 13 aa, Artificial Sequence
  source: /note="Description of Artificial Sequence: Synthetic peptide"
  MOD_RES (1)..(1): PyroGlu
  MOD_RES (4)..(4): hArg
  MOD_RES (5)..(5): NMeLeu
  MOD_RES (11)..(11): pI-Phe
  MOD_RES (13)..(13): 4-F-F
ERPRLSHKGPFPF

SEQ ID NO: 510 - protein, 13 aa, Artificial Sequence
  source: /note="Description of Artificial Sequence: Synthetic peptide"
  MOD_RES (1)..(1): PyroGlu
  MOD_RES (4)..(4): hArg
  MOD_RES (5)..(5): Cha
  MOD_RES (11)..(11): pI-Phe
  MOD_RES (13)..(13): 4-F-F
ERPRASHKGPFPF

SEQ ID NO: 511 - protein, 13 aa, Artificial Sequence
  source: /note="Description of Artificial Sequence: Synthetic peptide"
  MOD_RES (1)..(1): PyroGlu
  MOD_RES (4)..(4): hArg
  MOD_RES (5)..(5): NMeLeu
  MOD_RES (11)..(11): pI-Phe
  MOD_RES (13)..(13): 4-Me-F
ERPRLSHKGPFPF

SEQ ID NO: 512 - protein, 13 aa, Artificial Sequence
  source: /note="Description of Artificial Sequence: Synthetic peptide"
  MOD_RES (1)..(1): PyroGlu
  MOD_RES (4)..(4): hArg
  MOD_RES (5)..(5): Cha
  MOD_RES (11)..(11): pI-Phe
  MOD_RES (13)..(13): 4-Me-F
ERPRASHKGPFPF

SEQ ID NO: 513 - protein, 13 aa, Artificial Sequence
  source: /note="Description of Artificial Sequence: Synthetic peptide"
  MOD_RES (1)..(1): PyroGlu
  MOD_RES (4)..(4): hArg
  MOD_RES (5)..(5): Cha
  MOD_RES (11)..(11): Nle
  MOD_RES (13)..(13): 4-Me-F
ERPRASHKGPLPF

SEQ ID NO: 514 - protein, 13 aa, Artificial Sequence
  source: /note="Description of Artificial Sequence: Synthetic peptide"
  MOD_RES (1)..(1): PyroGlu
  MOD_RES (4)..(4): hArg
  MOD_RES (5)..(5): Cha
  MOD_RES (11)..(11): Nle
  MOD_RES (13)..(13): D-Bip
ERPRASHKGPLPF

SEQ ID NO: 515 - protein, 13 aa, Artificial Sequence
  source: /note="Description of Artificial Sequence: Synthetic peptide"
  MOD_RES (1)..(1): PyroGlu
  MOD_RES (4)..(4): hArg
  MOD_RES (5)..(5): NMeLeu
  MOD_RES (11)..(11): Nle
  MOD_RES (13)..(13): D-1Nal
ERPRLSHKGPLPA

SEQ ID NO: 516 - protein, 13 aa, Artificial Sequence
  source: /note="Description of Artificial Sequence: Synthetic peptide"
  MOD_RES (1)..(1): PyroGlu
  MOD_RES (4)..(4): hArg
  MOD_RES (5)..(5): NMeLeu
  MOD_RES (11)..(11): pI-Phe
  MOD_RES (13)..(13): D-1Nal
ERPRLSHKGPFPA

SEQ ID NO: 517 - protein, 13 aa, Artificial Sequence
  source: /note="Description of Artificial Sequence: Synthetic peptide"
  MOD_RES (1)..(1): PyroGlu
  MOD_RES (4)..(4): hArg
  MOD_RES (5)..(5): Cha
  MOD_RES (11)..(11): pI-Phe
  MOD_RES (13)..(13): D-1Nal
ERPRASHKGPFPA

SEQ ID NO: 518 - protein, 13 aa, Artificial Sequence
  source: /note="Description of Artificial Sequence: Synthetic peptide"
  MOD_RES (1)..(1): PyroGlu
  MOD_RES (4)..(4): hArg
  MOD_RES (5)..(5): Cha
  MOD_RES (11)..(11): Nle
  MOD_RES (13)..(13): D-1Nal
ERPRASHKGPLPA

SEQ ID NO: 519 - protein, 13 aa, Artificial Sequence
  source: /note="Description of Artificial Sequence: Synthetic peptide"
  MOD_RES (1)..(1): PyroGlu
  MOD_RES (4)..(4): hArg
  MOD_RES (5)..(5): Cha
  MOD_RES (11)..(11): pI-Phe
  MOD_RES (13)..(13): pI-Phe
ERPRASHKGPFPF

SEQ ID NO: 520 - protein, 13 aa, Artificial Sequence
  source: /note="Description of Artificial Sequence: Synthetic peptide"
  MOD_RES (1)..(1): PyroGlu
  MOD_RES (4)..(4): hArg
  MOD_RES (5)..(5): Cha
  MOD_RES (11)..(11): pI-Phe
ERPRASHKGPFPY

SEQ ID NO: 521 - protein, 13 aa, Artificial Sequence
  source: /note="Description of Artificial Sequence: Synthetic peptide"
  MOD_RES (1)..(1): PyroGlu
  MOD_RES (4)..(4): hArg
  MOD_RES (5)..(5): Cha
  MOD_RES (11)..(11): Nle
  MOD_RES (13)..(13): pI-Phe
ERPRASHKGPLPF

SEQ ID NO: 522 - protein, 13 aa, Artificial Sequence
  source: /note="Description of Artificial Sequence: Synthetic peptide"
  MOD_RES (1)..(1): PyroGlu
  MOD_RES (4)..(4): hArg
  MOD_RES (5)..(5): Cha
  MOD_RES (11)..(11): pI-Phe
  MOD_RES (13)..(13): D-Phe
ERPRASHKGPFPF

SEQ ID NO: 523 - protein, 13 aa, Artificial Sequence
  source: /note="Description of Artificial Sequence: Synthetic peptide"
  MOD_RES (1)..(1): PyroGlu
  MOD_RES (4)..(4): hArg
  MOD_RES (5)..(5): Cha
  MOD_RES (11)..(11): Nle
  MOD_RES (13)..(13): D-Phe
ERPRASHKGPLPF

SEQ ID NO: 524 - protein, 13 aa, Artificial Sequence
  source: /note="Description of Artificial Sequence: Synthetic peptide"
  MOD_RES (1)..(1): PyroGlu
  MOD_RES (4)..(4): hArg
  MOD_RES (5)..(5): NMeLeu
  MOD_RES (11)..(11): Nle
  MOD_RES (13)..(13): NMePhe
  source: /note="C-term Amide"
ERPRLSHKGPLPF

SEQ ID NO: 525 - protein, 13 aa, Artificial Sequence
  source: /note="Description of Artificial Sequence: Synthetic peptide"
  MOD_RES (1)..(1): PyroGlu
  MOD_RES (4)..(4): hArg
  MOD_RES (5)..(5): NMeLeu
  MOD_RES (11)..(11): Nle
  MOD_RES (13)..(13): D-Trp
ERPRLSHKGPLPW

SEQ ID NO: 526 - protein, 13 aa, Artificial Sequence
  source: /note="Description of Artificial Sequence: Synthetic peptide"
  MOD_RES (1)..(1): PyroGlu
  MOD_RES (4)..(4): hArg
  MOD_RES (5)..(5): NMeLeu
  MOD_RES (11)..(11): pI-Phe
  MOD_RES (13)..(13): D-Trp
ERPRLSHKGPFPW

SEQ ID NO: 527 - protein, 13 aa, Artificial Sequence
  source: /note="Description of Artificial Sequence: Synthetic peptide"
  MOD_RES (1)..(1): PyroGlu
  MOD_RES (4)..(4): hArg
  MOD_RES (5)..(5): Cha
  MOD_RES (11)..(11): pI-Phe
  MOD_RES (13)..(13): D-Trp
ERPRASHKGPFPW

SEQ ID NO: 528 - protein, 13 aa, Artificial Sequence
  source: /note="Description of Artificial Sequence: Synthetic peptide"
  MOD_RES (1)..(1): PyroGlu
  MOD_RES (4)..(4): hArg
  MOD_RES (5)..(5): Cha
  MOD_RES (11)..(11): Nle
  MOD_RES (13)..(13): D-Trp
ERPRASHKGPLPW

SEQ ID NO: 529 - protein, 13 aa, Artificial Sequence
  source: /note="Description of Artificial Sequence: Synthetic peptide"
  MOD_RES (1)..(1): PyroGlu
  MOD_RES (4)..(4): hArg
  MOD_RES (5)..(5): Cha
  MOD_RES (11)..(11): Nle
ERPRASHKGPLPY

SEQ ID NO: 530 - protein, 13 aa, Artificial Sequence
  source: /note="Description of Artificial Sequence: Synthetic peptide"
  MOD_RES (1)..(1): PyroGlu
  MOD_RES (4)..(4): hArg
  MOD_RES (5)..(5): NMeLeu
  MOD_RES (11)..(11): Nle
  MOD_RES (13)..(13): D-Tyr
ERPRLSHKGPLPY

SEQ ID NO: 531 - protein, 13 aa, Artificial Sequence
  source: /note="Description of Artificial Sequence: Synthetic peptide"
  MOD_RES (1)..(1): PyroGlu
  MOD_RES (4)..(4): hArg
  MOD_RES (5)..(5): NMeLeu
  MOD_RES (11)..(11): pI-Phe
  MOD_RES (13)..(13): D-Tyr
ERPRLSHKGPFPY

SEQ ID NO: 532 - protein, 13 aa, Artificial Sequence
  source: /note="Description of Artificial Sequence: Synthetic peptide"
  MOD_RES (1)..(1): PyroGlu
  MOD_RES (4)..(4): hArg
  MOD_RES (5)..(5): Cha
  MOD_RES (11)..(11): pI-Phe
  MOD_RES (13)..(13): D-Tyr
ERPRASHKGPFPY

SEQ ID NO: 533 - protein, 13 aa, Artificial Sequence
  source: /note="Description of Artificial Sequence: Synthetic peptide"
  MOD_RES (1)..(1): PyroGlu
  MOD_RES (4)..(4): hArg
  MOD_RES (5)..(5): Cha
  MOD_RES (11)..(11): Nle
  MOD_RES (13)..(13): D-Tyr
ERPRASHKGPLPY

SEQ ID NO: 534 - protein, 13 aa, Artificial Sequence
  source: /note="Description of Artificial Sequence: Synthetic peptide"
  MOD_RES (1)..(1): PyroGlu
  MOD_RES (4)..(4): hArg
  MOD_RES (5)..(5): NMeLeu
  MOD_RES (11)..(11): pI-Phe
  MOD_RES (13)..(13): 2-Nal
ERPRLFHKGPFPA

SEQ ID NO: 535 - protein, 13 aa, Artificial Sequence
  source: /note="Description of Artificial Sequence: Synthetic peptide"
  MOD_RES (1)..(1): PyroGlu
  MOD_RES (4)..(4): hArg
  MOD_RES (5)..(5): NMeLeu
  MOD_RES (11)..(11): Nle
  MOD_RES (13)..(13): D-Bip
  source: /note="C-term Amide"
ERPRLFHKGPLPF

SEQ ID NO: 536 - protein, 13 aa, Artificial Sequence
  source: /note="Description of Artificial Sequence: Synthetic peptide"
  MOD_RES (1)..(1): PyroGlu
  MOD_RES (4)..(4): hArg
  MOD_RES (5)..(5): NMeLeu
  MOD_RES (11)..(11): Nle
  MOD_RES (13)..(13): D-Bip
ERPRLFHKGPLPF

SEQ ID NO: 537 - protein, 13 aa, Artificial Sequence
  source: /note="Description of Artificial Sequence: Synthetic peptide"
  MOD_RES (1)..(1): PyroGlu
  MOD_RES (4)..(4): hArg
  MOD_RES (5)..(5): NMeLeu
  MOD_RES (11)..(11): pI-Phe
  MOD_RES (13)..(13): D-Bip
ERPRLFHKGPFPF

SEQ ID NO: 538 - protein, 13 aa, Artificial Sequence
  source: /note="Description of Artificial Sequence: Synthetic peptide"
  source: /note="N-term Palmitoyl"
  MOD_RES (4)..(4): hArg
  MOD_RES (5)..(5): NMeLeu
  MOD_RES (11)..(11): Nle
  MOD_RES (13)..(13): D-Bip
LRPRLFHKGPLPF

SEQ ID NO: 539 - protein, 13 aa, Artificial Sequence
  source: /note="Description of Artificial Sequence: Synthetic peptide"
  MOD_RES (1)..(1): PyroGlu
  MOD_RES (4)..(4): hArg
  MOD_RES (5)..(5): Cha
  MOD_RES (11)..(11): pI-Phe
  MOD_RES (13)..(13): D-Bip
ERPRASHKGPFPF

SEQ ID NO: 540 - protein, 13 aa, Artificial Sequence
  source: /note="Description of Artificial Sequence: Synthetic peptide"
  MOD_RES (1)..(1): PyroGlu
  MOD_RES (4)..(4): hArg
  MOD_RES (5)..(5): NMeLeu
  MOD_RES (11)..(11): Nle
  MOD_RES (13)..(13): 4-Me-F
ERPRLSHKGPLPF

SEQ ID NO: 541 - protein, 13 aa, Artificial Sequence
  source: /note="Description of Artificial Sequence: Synthetic peptide"
  MOD_RES (1)..(1): PyroGlu
  MOD_RES (4)..(4): hArg
  MOD_RES (5)..(5): NMeLeu
  MOD_RES (11)..(11): pI-Phe
  MOD_RES (13)..(13): D-Bip
  source: /note="C-term Amide"
ERPRLFHKGPFPF

SEQ ID NO: 542 - protein, 13 aa, Artificial Sequence
  source: /note="Description of Artificial Sequence: Synthetic peptide"
  MOD_RES (1)..(1): PyroGlu
  MOD_RES (4)..(4): hArg
  MOD_RES (5)..(5): Cha
  MOD_RES (11)..(11): Nle
  MOD_RES (13)..(13): D-Phe
  source: /note="C-term Amide"
ERPRASHKGPLPF

SEQ ID NO: 543 - protein, 13 aa, Artificial Sequence
  source: /note="Description of Artificial Sequence: Synthetic peptide"
  MOD_RES (1)..(1): PyroGlu
  MOD_RES (4)..(4): hArg
  MOD_RES (5)..(5): NMeLeu
  MOD_RES (11)..(11): Nle
  MOD_RES (13)..(13): 4-Cl-F
  source: /note="C-term Amide"
ERPRLSHKGPLPF

SEQ ID NO: 544 - protein, 13 aa, Artificial Sequence
  source: /note="Description of Artificial Sequence: Synthetic peptide"
  MOD_RES (1)..(1): PyroGlu
  MOD_RES (4)..(4): hArg
  MOD_RES (5)..(5): NMeLeu
  MOD_RES (11)..(11): Nle
  MOD_RES (13)..(13): 4-Me-F
  source: /note="C-term Amide"
ERPRLSHKGPLPF

SEQ ID NO: 545 - protein, 13 aa, Artificial Sequence
  source: /note="Description of Artificial Sequence: Synthetic peptide"
  MOD_RES (1)..(1): PyroGlu
  MOD_RES (4)..(4): hArg
  MOD_RES (5)..(5): NMeLeu
  MOD_RES (11)..(11): Nle
  MOD_RES (13)..(13): Bip
  source: /note="C-term Amide"
ERPRLSHKGPLPF

SEQ ID NO: 546 - protein, 13 aa, Artificial Sequence
  source: /note="Description of Artificial Sequence: Synthetic peptide"
  MOD_RES (1)..(1): PyroGlu
  MOD_RES (4)..(4): hArg
  MOD_RES (5)..(5): NMeLeu
  MOD_RES (11)..(11): Nle
  MOD_RES (13)..(13): D-Bip
  source: /note="C-term Amide"
ERPRLSHKGPLPF

SEQ ID NO: 547 - protein, 13 aa, Artificial Sequence
  source: /note="Description of Artificial Sequence: Synthetic peptide"
  MOD_RES (1)..(1): PyroGlu
  MOD_RES (4)..(4): hArg
  MOD_RES (5)..(5): NMeLeu
  MOD_RES (11)..(11): Nle
  MOD_RES (13)..(13): 4-NO2-F
  source: /note="C-term Amide"
ERPRLSHKGPLPF

SEQ ID NO: 548 - protein, 13 aa, Artificial Sequence
  source: /note="Description of Artificial Sequence: Synthetic peptide"
  MOD_RES (1)..(1): PyroGlu
  MOD_RES (4)..(4): hArg
  MOD_RES (5)..(5): NMeLeu
  MOD_RES (10)..(10): 1-Nal
  MOD_RES (11)..(11): Nle
  MOD_RES (13)..(13): 4-Cl-F
  source: /note="C-term Amide"
ERPRLSHKGALPF

SEQ ID NO: 549 - protein, 13 aa, Artificial Sequence
  source: /note="Description of Artificial Sequence: Synthetic peptide"
  MOD_RES (1)..(1): PyroGlu
  MOD_RES (4)..(4): hArg
  MOD_RES (5)..(5): NMeLeu
  MOD_RES (10)..(10): 1-Nal
  MOD_RES (11)..(11): Nle
  MOD_RES (13)..(13): 4-Cl-F
  source: /note="C-term Amide"
ERPRLFHKGALPF

SEQ ID NO: 550 - protein, 13 aa, Artificial Sequence
  source: /note="Description of Artificial Sequence: Synthetic peptide"
  MOD_RES (1)..(1): PyroGlu
  MOD_RES (4)..(4): hArg
  MOD_RES (5)..(5): NMeLeu
  MOD_RES (11)..(11): Nle
  MOD_RES (13)..(13): 4-Cl-F
  source: /note="C-term Amide"
ERPRLFHKGPLPF

SEQ ID NO: 551 - protein, 13 aa, Artificial Sequence
  source: /note="Description of Artificial Sequence: Synthetic peptide"
  MOD_RES (1)..(1): PyroGlu
  MOD_RES (4)..(4): hArg
  MOD_RES (5)..(5): NMeLeu
  MOD_RES (10)..(10): 1-Nal
  MOD_RES (11)..(11): Nle
  MOD_RES (13)..(13): 4-Cl-F
  source: /note="C-term Amide"
ERPRLSAKGALPF

SEQ ID NO: 552 - protein, 13 aa, Artificial Sequence
  source: /note="Description of Artificial Sequence: Synthetic peptide"
  MOD_RES (1)..(1): PyroGlu
  MOD_RES (4)..(4): hArg
  MOD_RES (5)..(5): NMeLeu
  MOD_RES (10)..(10): 1-Nal
  MOD_RES (11)..(11): Nle
  MOD_RES (13)..(13): 4-Cl-F
  source: /note="C-term Amide"
ERPRLFAKGALPF

SEQ ID NO: 553 - protein, 13 aa, Artificial Sequence
  source: /note="Description of Artificial Sequence: Synthetic peptide"
  MOD_RES (1)..(1): PyroGlu
  MOD_RES (4)..(4): hArg
  MOD_RES (5)..(5): NMeLeu
  MOD_RES (11)..(11): Nle
  MOD_RES (13)..(13): 4-Cl-F
  source: /note="C-term Amide"
ERPRLFAKGPLPF

SEQ ID NO: 554 - protein, 13 aa, Artificial Sequence
  source: /note="Description of Artificial Sequence: Synthetic peptide"
  MOD_RES (1)..(1): PyroGlu
  MOD_RES (4)..(4): hArg
  MOD_RES (5)..(5): NMeLeu
  MOD_RES (7)..(7): 1-Nal
  MOD_RES (10)..(10): 1-Nal
  MOD_RES (11)..(11): Nle
  MOD_RES (13)..(13): 4-Cl-F
  source: /note="C-term Amide"
ERPRLSAKGALPF

SEQ ID NO: 555 - protein, 13 aa, Artificial Sequence
  source: /note="Description of Artificial Sequence: Synthetic peptide"
  MOD_RES (1)..(1): PyroGlu
  MOD_RES (4)..(4): hArg
  MOD_RES (5)..(5): NMeLeu
  MOD_RES (7)..(7): 1-Nal
  MOD_RES (10)..(10): 1-Nal
  MOD_RES (11)..(11): Nle
  MOD_RES (13)..(13): 4-Cl-F
  source: /note="C-term Amide"
ERPRLFAKGALPF

SEQ ID NO: 556 - protein, 13 aa, Artificial Sequence
  source: /note="Description of Artificial Sequence: Synthetic peptide"
  MOD_RES (1)..(1): PyroGlu
  MOD_RES (4)..(4): hArg
  MOD_RES (5)..(5): NMeLeu
  MOD_RES (7)..(7): 1-Nal
  MOD_RES (11)..(11): Nle
  MOD_RES (13)..(13): 4-Cl-F
  source: /note="C-term Amide"
ERPRLFAKGPLPF

SEQ ID NO: 557 - protein, 13 aa, Artificial Sequence
  source: /note="Description of Artificial Sequence: Synthetic peptide"
  MOD_RES (1)..(1): PyroGlu
  MOD_RES (4)..(4): hArg
  MOD_RES (5)..(5): NMeLeu
  MOD_RES (7)..(7): 1-Nal
  MOD_RES (11)..(11): Nle
  MOD_RES (13)..(13): 4-Cl-F
  source: /note="C-term Amide"
ERPRLFAKGPLPF

SEQ ID NO: 558 - protein, 13 aa, Artificial Sequence
  source: /note="Description of Artificial Sequence: Synthetic peptide"
  MOD_RES (1)..(1): PyroGlu
  MOD_RES (4)..(4): hArg
  MOD_RES (5)..(5): NMeLeu
  MOD_RES (6)..(6): NMePhe
  MOD_RES (7)..(7): 1-Nal
  MOD_RES (11)..(11): Nle
  MOD_RES (13)..(13): 4-Cl-F
  source: /note="C-term Amide"
ERPRLFAKGPLPF

SEQ ID NO: 559 - protein, 13 aa, Artificial Sequence
  source: /note="Description of Artificial Sequence: Synthetic peptide"
  MOD_RES (1)..(1): PyroGlu
  MOD_RES (4)..(4): hArg
  MOD_RES (5)..(5): NMeLeu
  MOD_RES (6)..(6): NMePhe
  MOD_RES (10)..(10): 1-Nal
  MOD_RES (11)..(11): Nle
  MOD_RES (13)..(13): 4-Cl-F
  source: /note="C-term Amide"
ERPRLFAKGALPF

SEQ ID NO: 560 - protein, 13 aa, Artificial Sequence
  source: /note="Description of Artificial Sequence: Synthetic peptide"
  MOD_RES (1)..(1): PyroGlu
  MOD_RES (4)..(4): hArg
  MOD_RES (5)..(5): NMeLeu
  MOD_RES (6)..(6): NMePhe
  MOD_RES (10)..(10): 1-Nal
  MOD_RES (11)..(11): Nle
  MOD_RES (13)..(13): 4-Cl-F
  source: /note="C-term Amide"
ERPRLFAKGALPF

SEQ ID NO: 561 - protein, 13 aa, Artificial Sequence
  source: /note="Description of Artificial Sequence: Synthetic peptide"
  MOD_RES (1)..(1): PyroGlu
  MOD_RES (4)..(4): hArg
  MOD_RES (5)..(5): NMeLeu
  MOD_RES (7)..(7): 2-Nal
  MOD_RES (10)..(10): 1-Nal
  MOD_RES (11)..(11): Nle
  MOD_RES (13)..(13): 4-Cl-F
  source: /note="C-term Amide"
ERPRLFAKGALPF

SEQ ID NO: 562 - protein, 13 aa, Artificial Sequence
  source: /note="Description of Artificial Sequence: Synthetic peptide"
  MOD_RES (1)..(1): PyroGlu
  MOD_RES (4)..(4): hArg
  MOD_RES (5)..(5): NMeLeu
  MOD_RES (7)..(7): 2-Nal
  MOD_RES (11)..(11): Nle
  MOD_RES (13)..(13): 4-Cl-F
  source: /note="C-term Amide"
ERPRLFAKGPLPF

SEQ ID NO: 563 - protein, 13 aa, Artificial Sequence
  source: /note="Description of Artificial Sequence: Synthetic peptide"
  MOD_RES (1)..(1): PyroGlu
  MOD_RES (4)..(4): hArg
  MOD_RES (5)..(5): NMeLeu
  MOD_RES (6)..(6): NMePhe
  MOD_RES (7)..(7): 2-Nal
  MOD_RES (11)..(11): Nle
  MOD_RES (13)..(13): 4-Cl-F
  source: /note="C-term Amide"
ERPRLFAKGPLPF

SEQ ID NO: 564 - protein, 13 aa, Artificial Sequence
  source: /note="Description of Artificial Sequence: Synthetic peptide"
  MOD_RES (1)..(1): PyroGlu
  MOD_RES (4)..(4): hArg
  MOD_RES (5)..(5): NMeLeu
  MOD_RES (11)..(11): Nle
  MOD_RES (13)..(13): D-Bip
ERPRLSHKGPLPF

SEQ ID NO: 565 - protein, 13 aa, Artificial Sequence
  source: /note="Description of Artificial Sequence: Synthetic peptide"
  MOD_RES (1)..(1): PyroGlu
  MOD_RES (4)..(4): hArg
  MOD_RES (5)..(5): NMeLeu
  MOD_RES (11)..(11): pI-Phe
  MOD_RES (13)..(13): D-Bip
ERPRLSHKGPFPF

SEQ ID NO: 566 - protein, 13 aa, Artificial Sequence
  source: /note="Description of Artificial Sequence: Synthetic peptide"
  MOD_RES (1)..(1): PyroGlu
  MOD_RES (4)..(4): hArg
  MOD_RES (5)..(5): NMeLeu
  MOD_RES (11)..(11): pI-Phe
  MOD_RES (13)..(13): 2-Nal
ERPRLSHKGPFPA

SEQ ID NO: 567 - protein, 13 aa, Artificial Sequence
  source: /note="Description of Artificial Sequence: Synthetic peptide"
  source: /note="N-term Palmitoyl"
  MOD_RES (4)..(4): hArg
  MOD_RES (5)..(5): NMeLeu
  MOD_RES (11)..(11): pI-Phe
  MOD_RES (13)..(13): D-Bip
  source: /note="C-term Amide"
LRPRLSHKGPFPF

SEQ ID NO: 568 - protein, 14 aa, Artificial Sequence
  source: /note="Description of Artificial Sequence: Synthetic peptide"
  MOD_RES (1)..(1): PyroGlu
  MOD_RES (4)..(4): hArg
  MOD_RES (5)..(5): NMeLeu
  MOD_RES (11)..(11): Nle
  MOD_RES (13)..(13): D-Bip
  MOD_RES (14)..(14): K(Palmitoyl)
  source: /note="C-term Amide"
ERPRLSHKGPLPFK

SEQ ID NO: 569 - protein, 13 aa, Artificial Sequence
  source: /note="Description of Artificial Sequence: Synthetic peptide"
  MOD_RES (1)..(1): PyroGlu
  MOD_RES (4)..(4): hArg
  MOD_RES (5)..(5): NMeLeu
  MOD_RES (11)..(11): Nle
  MOD_RES (13)..(13): 2-Nal
ERPRLSHKGPLPA

SEQ ID NO: 570 - protein, 13 aa, Artificial Sequence
  source: /note="Description of Artificial Sequence: Synthetic peptide"
  MOD_RES (1)..(1): PyroGlu
  MOD_RES (4)..(4): hArg
  MOD_RES (5)..(5): NMeLeu
  MOD_RES (11)..(11): pI-Phe
  MOD_RES (13)..(13): 4-Cl-F
ERPRLSHKGPFPF

SEQ ID NO: 571 - protein, 13 aa, Artificial Sequence
  source: /note="Description of Artificial Sequence: Synthetic peptide"
  MOD_RES (1)..(1): PyroGlu
  MOD_RES (4)..(4): hArg
  MOD_RES (5)..(5): NMeLeu
  MOD_RES (11)..(11): Nle
  MOD_RES (13)..(13): 4-Cl-F
ERPRLSHKGPLPF

SEQ ID NO: 572 - protein, 13 aa, Artificial Sequence
  source: /note="Description of Artificial Sequence: Synthetic peptide"
  MOD_RES (1)..(1): PyroGlu
  MOD_RES (4)..(4): hArg
  MOD_RES (5)..(5): NMeLeu
  MOD_RES (11)..(11): Nle
  MOD_RES (13)..(13): 4-F-F
ERPRLSHKGPLPF

SEQ ID NO: 573 - protein, 13 aa, Artificial Sequence
  source: /note="Description of Artificial Sequence: Synthetic peptide"
  MOD_RES (1)..(1): PyroGlu
  MOD_RES (4)..(4): hArg
  MOD_RES (5)..(5): Cha
  MOD_RES (11)..(11): Nle
  MOD_RES (13)..(13): 4-F-F
ERPRASHKGPLPF

SEQ ID NO: 574 - protein, 13 aa, Artificial Sequence
  source: /note="Description of Artificial Sequence: Synthetic peptide"
  MOD_RES (1)..(1): PyroGlu
  MOD_RES (4)..(4): hArg
  MOD_RES (5)..(5): NMeLeu
  MOD_RES (11)..(11): Nle
  MOD_RES (13)..(13): pI-Phe
ERPRLSHKGPLPF

SEQ ID NO: 575 - protein, 13 aa, Artificial Sequence
  source: /note="Description of Artificial Sequence: Synthetic peptide"
  MOD_RES (1)..(1): PyroGlu
  MOD_RES (4)..(4): hArg
  MOD_RES (5)..(5): NMeLeu
  MOD_RES (11)..(11): Nle
  MOD_RES (13)..(13): D-Phe
ERPRLSHKGPLPF

SEQ ID NO: 576 - protein, 13 aa, Artificial Sequence
  source: /note="Description of Artificial Sequence: Synthetic peptide"
  source: /note="N-term Palmitoyl"
  MOD_RES (4)..(4): hArg
  MOD_RES (5)..(5): NMeLeu
  MOD_RES (11)..(11): pI-Phe
  MOD_RES (13)..(13): D-Bip
  source: /note="C-term Amide"
LRPRLSHKGPFPF

SEQ ID NO: 577 - protein, 14 aa, Artificial Sequence
  source: /note="Description of Artificial Sequence: Synthetic peptide"
  MOD_RES (1)..(1): PyroGlu
  MOD_RES (4)..(4): hArg
  MOD_RES (5)..(5): NMeLeu
  MOD_RES (11)..(11): Nle
  MOD_RES (13)..(13): D-Bip
  MOD_RES (14)..(14): K(Palmitoyl)
  source: /note="C-term Amide"
ERPRLSHKGPLPFK

SEQ ID NO: 578 - protein, 13 aa, Artificial Sequence
  source: /note="Description of Artificial Sequence: Synthetic peptide"
  MOD_RES (1)..(1): PyroGlu
  MOD_RES (4)..(4): hArg
  MOD_RES (5)..(5): Cha
  MOD_RES (11)..(11): pI-Phe
  MOD_RES (13)..(13): 2-Nal
ERPRASHKGPFPA

SEQ ID NO: 579 - protein, 14 aa, Artificial Sequence
  source: /note="Description of Artificial Sequence: Synthetic peptide"
  source: /note="N-term Acetyl"
  MOD_RES (1)..(1): Pra
  MOD_RES (5)..(5): hArg
  MOD_RES (6)..(6): NMeLeu
  MOD_RES (7)..(7): Pra
  MOD_RES (12)..(12): Nle
  MOD_RES (14)..(14): 4-Cl-F
GLRPRLGHKGPLPF

SEQ ID NO: 580 - protein, 14 aa, Artificial Sequence
  source: /note="Description of Artificial Sequence: Synthetic peptide"
  source: /note="N-term Acetyl"
  MOD_RES (1)..(1): Pra
  MOD_RES (5)..(5): hArg
  MOD_RES (6)..(6): NMeLeu
  MOD_RES (7)..(7): Pra
  MOD_RES (12)..(12): Nle
  MOD_RES (14)..(14): 4-Cl-F
GLRPRLGHKGPLPF

SEQ ID NO: 581 - protein, 14 aa, Artificial Sequence
  source: /note="Description of Artificial Sequence: Synthetic peptide"
  source: /note="N-term Acetyl"
  MOD_RES (1)..(1): Pra
  MOD_RES (5)..(5): NMeArg
  MOD_RES (6)..(6): NMeLeu
  MOD_RES (7)..(7): Pra
  MOD_RES (12)..(12): Nle
  MOD_RES (14)..(14): 4-Cl-F
GLRPRLGHKGPLPF

SEQ ID NO: 582 - protein, 14 aa, Artificial Sequence
  source: /note="Description of Artificial Sequence: Synthetic peptide"
  source: /note="N-term Acetyl"
  MOD_RES (1)..(1): Pra
  MOD_RES (3)..(3): NMeArg
  MOD_RES (5)..(5): hArg
  MOD_RES (6)..(6): NMeLeu
  MOD_RES (7)..(7): Pra
  MOD_RES (12)..(12): Nle
  MOD_RES (14)..(14): 4-Cl-F
GLRPRLGHKGPLPF

SEQ ID NO: 583 - protein, 14 aa, Artificial Sequence
  source: /note="Description of Artificial Sequence: Synthetic peptide"
  source: /note="N-term Acetyl"
  MOD_RES (1)..(1): Pra
  MOD_RES (3)..(3): NMeArg
  MOD_RES (5)..(5): NMeArg
  MOD_RES (6)..(6): NMeLeu
  MOD_RES (7)..(7): Pra
  MOD_RES (12)..(12): Nle
  MOD_RES (14)..(14): 4-Cl-F
GLRPRLGHKGPLPF

SEQ ID NO: 584 - protein, 13 aa, Artificial Sequence
  source: /note="Description of Artificial Sequence: Synthetic peptide"
  MOD_RES (1)..(1): PyroGlu
  MOD_RES (4)..(4): hArg
  MOD_RES (5)..(5): NMeLeu
  MOD_RES (6)..(6): Pra
  MOD_RES (10)..(10): Oic
  MOD_RES (11)..(11): Nle
  MOD_RES (13)..(13): 4-Cl-F
ERPRLGHKGXLPF

SEQ ID NO: 585 - protein, 13 aa, Artificial Sequence
  source: /note="Description of Artificial Sequence: Synthetic peptide"
  MOD_RES (1)..(1): PyroGlu
  MOD_RES (4)..(4): hArg
  MOD_RES (5)..(5): NMeLeu
  MOD_RES (6)..(6): Pra
  MOD_RES (10)..(10): Oic
  MOD_RES (11)..(11): Nle
  MOD_RES (13)..(13): 4-Cl-F
ERPRLGHKGXLPF

SEQ ID NO: 586 - protein, 13 aa, Artificial Sequence
  source: /note="Description of Artificial Sequence: Synthetic peptide"
  MOD_RES (1)..(1): PyroGlu
  MOD_RES (4)..(4): NMeArg
  MOD_RES (5)..(5): NMeLeu
  MOD_RES (6)..(6): Pra
  MOD_RES (10)..(10): Oic
  MOD_RES (11)..(11): Nle
  MOD_RES (13)..(13): 4-Cl-F
ERPRLGHKGXLPF

SEQ ID NO: 587 - protein, 13 aa, Artificial Sequence
  source: /note="Description of Artificial Sequence: Synthetic peptide"
  MOD_RES (1)..(1): PyroGlu
  MOD_RES (2)..(2): NMeArg
  MOD_RES (4)..(4): hArg
  MOD_RES (5)..(5): NMeLeu
  MOD_RES (6)..(6): Pra
  MOD_RES (10)..(10): Oic
  MOD_RES (11)..(11): Nle
  MOD_RES (13)..(13): 4-Cl-F
ERPRLGHKGXLPF

SEQ ID NO: 588 - protein, 13 aa, Artificial Sequence
  source: /note="Description of Artificial Sequence: Synthetic peptide"
  MOD_RES (1)..(1): PyroGlu
  MOD_RES (2)..(2): NMeArg
  MOD_RES (4)..(4): NMeArg
  MOD_RES (5)..(5): NMeLeu
  MOD_RES (6)..(6): Pra
  MOD_RES (10)..(10): Oic
  MOD_RES (11)..(11): Nle
  MOD_RES (13)..(13): 4-Cl-F
ERPRLGHKGXLPF

SEQ ID NO: 589 - protein, 13 aa, Artificial Sequence
  source: /note="Description of Artificial Sequence: Synthetic peptide"
  MOD_RES (1)..(1): PyroGlu
  MOD_RES (4)..(4): hArg
  MOD_RES (12)..(12): 1-Nal
ERPRLFHKGPFAF

SEQ ID NO: 590 - protein, 13 aa, Artificial Sequence
  source: /note="Description of Artificial Sequence: Synthetic peptide"
  MOD_RES (1)..(1): PyroGlu
  MOD_RES (5)..(5): Chg
  MOD_RES (12)..(12): 1-Nal
ERPRGFHKGPFAF

SEQ ID NO: 591 - protein, 13 aa, Artificial Sequence
  source: /note="Description of Artificial Sequence: Synthetic peptide"
  MOD_RES (1)..(1): PyroGlu
  MOD_RES (5)..(5): Chg
  MOD_RES (12)..(12): 1-Nal
ERPRGFKKPPFAF

SEQ ID NO: 592 - protein, 13 aa, Artificial Sequence
  source: /note="Description of Artificial Sequence: Synthetic peptide"
  MOD_RES (1)..(1): PyroGlu
  MOD_RES (5)..(5): Chg
ERPRGFKKPPFPF

SEQ ID NO: 593 - protein, 13 aa, Artificial Sequence
  source: /note="Description of Artificial Sequence: Synthetic peptide"
  MOD_RES (1)..(1): PyroGlu
  MOD_RES (5)..(5): NMeLeu
ERPRLFHKPPFPF

SEQ ID NO: 594 - protein, 13 aa, Artificial Sequence
  source: /note="Description of Artificial Sequence: Synthetic peptide"
  MOD_RES (1)..(1): PyroGlu
  MOD_RES (5)..(5): NMeLeu
  MOD_RES (12)..(12): 1-Nal
ERPRLSHKPPFAF

SEQ ID NO: 595 - protein, 13 aa, Artificial Sequence
  source: /note="Description of Artificial Sequence: Synthetic peptide"
  MOD_RES (1)..(1): PyroGlu
  MOD_RES (5)..(5): Cha
  MOD_RES (12)..(12): 1-Nal
ERPRAFHKGPMAF

SEQ ID NO: 596 - protein, 13 aa, Artificial Sequence
  source: /note="Description of Artificial Sequence: Synthetic peptide"
  MOD_RES (1)..(1): PyroGlu
  MOD_RES (5)..(5): NMeLeu
  MOD_RES (12)..(12): 1-Nal
ERPRLFHKPPFAF

SEQ ID NO: 597 - protein, 13 aa, Artificial Sequence
  source: /note="Description of Artificial Sequence: Synthetic peptide"
  MOD_RES (1)..(1): PyroGlu
  MOD_RES (5)..(5): NMeLeu
  MOD_RES (12)..(12): 1-Nal
ERPRLFHKGPFAF

SEQ ID NO: 598 - protein, 13 aa, Artificial Sequence
  source: /note="Description of Artificial Sequence: Synthetic peptide"
  MOD_RES (1)..(1): PyroGlu
  MOD_RES (5)..(5): NMeLeu
ERPRLFKKPPFPF

SEQ ID NO: 599 - protein, 13 aa, Artificial Sequence
  source: /note="Description of Artificial Sequence: Synthetic peptide"
  MOD_RES (1)..(1): PyroGlu
  MOD_RES (5)..(5): Cha
  MOD_RES (11)..(11): Nle
ERPRAFHKPPLPF

SEQ ID NO: 600 - protein, 13 aa, Artificial Sequence
  source: /note="Description of Artificial Sequence: Synthetic peptide"
  MOD_RES (1)..(1): PyroGlu
  MOD_RES (5)..(5): Cha
  MOD_RES (11)..(11): Nle
  MOD_RES (12)..(12): 1-Nal
ERPRASHKPPLAF

SEQ ID NO: 601 - protein, 13 aa, Artificial Sequence
  source: /note="Description of Artificial Sequence: Synthetic peptide"
  MOD_RES (1)..(1): PyroGlu
  MOD_RES (5)..(5): Cha
  MOD_RES (11)..(11): Nle
  MOD_RES (12)..(12): 1-Nal
ERPRAFHKPPLAF

SEQ ID NO: 602 - protein, 13 aa, Artificial Sequence
  source: /note="Description of Artificial Sequence: Synthetic peptide"
  MOD_RES (1)..(1): PyroGlu
  MOD_RES (5)..(5): Cha
  MOD_RES (11)..(11): Nle
  MOD_RES (12)..(12): 1-Nal
ERPRAFHKGPLAF

SEQ ID NO: 603 - protein, 13 aa, Artificial Sequence
  source: /note="Description of Artificial Sequence: Synthetic peptide"
  MOD_RES (1)..(1): PyroGlu
  MOD_RES (5)..(5): Cha
  MOD_RES (11)..(11): Nle
  MOD_RES (12)..(12): 1-Nal
ERPRAFKKPPLAF

SEQ ID NO: 604 - protein, 13 aa, Artificial Sequence
  source: /note="Description of Artificial Sequence: Synthetic peptide"
  MOD_RES (1)..(1): PyroGlu
  MOD_RES (5)..(5): Cha
  MOD_RES (11)..(11): Nle
ERPRAFKKPPLPF

SEQ ID NO: 605 - protein, 13 aa, Artificial Sequence
  source: /note="Description of Artificial Sequence: Synthetic peptide"
  MOD_RES (1)..(1): PyroGlu
  MOD_RES (4)..(4): hArg
  MOD_RES (5)..(5): Cha
  MOD_RES (11)..(11): Nle
ERPRASHKPPLPF

SEQ ID NO: 606 - protein, 13 aa, Artificial Sequence
  source: /note="Description of Artificial Sequence: Synthetic peptide"
  MOD_RES (1)..(1): PyroGlu
  MOD_RES (4)..(4): hArg
  MOD_RES (5)..(5): Cha
  MOD_RES (11)..(11): Nle
ERPRAFHKPPLPF

SEQ ID NO: 607 - protein, 13 aa, Artificial Sequence
  source: /note="Description of Artificial Sequence: Synthetic peptide"
  MOD_RES (1)..(1): PyroGlu
  MOD_RES (4)..(4): hArg
  MOD_RES (5)..(5): Cha
  MOD_RES (11)..(11): Nle
  MOD_RES (12)..(12): 1-Nal
ERPRASHKPPLAF

SEQ ID NO: 608 - protein, 13 aa, Artificial Sequence
  source: /note="Description of Artificial Sequence: Synthetic peptide"
  MOD_RES (1)..(1): PyroGlu
  MOD_RES (4)..(4): hArg
  MOD_RES (5)..(5): Cha
  MOD_RES (11)..(11): Nle
  MOD_RES (12)..(12): 1-Nal
ERPRAFHKPPLAF

SEQ ID NO: 609 - protein, 13 aa, Artificial Sequence
  source: /note="Description of Artificial Sequence: Synthetic peptide"
  MOD_RES (1)..(1): PyroGlu
  MOD_RES (4)..(4): hArg
  MOD_RES (5)..(5): Cha
  MOD_RES (11)..(11): Nle
  MOD_RES (12)..(12): 1-Nal
ERPRAFHKGPLAF

SEQ ID NO: 610 - protein, 13 aa, Artificial Sequence
  source: /note="Description of Artificial Sequence: Synthetic peptide"
  MOD_RES (1)..(1): PyroGlu
  MOD_RES (4)..(4): hArg
  MOD_RES (5)..(5): Cha
  MOD_RES (11)..(11): Nle
  MOD_RES (12)..(12): 1-Nal
ERPRAFKKPPLAF

SEQ ID NO: 611 - protein, 13 aa, Artificial Sequence
  source: /note="Description of Artificial Sequence: Synthetic peptide"
  MOD_RES (1)..(1): PyroGlu
  MOD_RES (4)..(4): hArg
  MOD_RES (5)..(5): Cha
  MOD_RES (11)..(11): Nle
ERPRAFKKPPLPF

SEQ ID NO: 612 - protein, 13 aa, Artificial Sequence
  source: /note="Description of Artificial Sequence: Synthetic peptide"
  MOD_RES (1)..(1): PyroGlu
  MOD_RES (4)..(4): hArg
  MOD_RES (11)..(11): Nle
ERPRLFHKPPLPF

SEQ ID NO: 613 - protein, 13 aa, Artificial Sequence
  source: /note="Description of Artificial Sequence: Synthetic peptide"
  MOD_RES (1)..(1): PyroGlu
  MOD_RES (4)..(4): hArg
  MOD_RES (11)..(11): Nle
  MOD_RES (12)..(12): 1-Nal
ERPRLSHKPPLAF

SEQ ID NO: 614 - protein, 13 aa, Artificial Sequence
  source: /note="Description of Artificial Sequence: Synthetic peptide"
  MOD_RES (1)..(1): PyroGlu
  MOD_RES (4)..(4): hArg
  MOD_RES (11)..(11): Nle
  MOD_RES (12)..(12): 1-Nal
ERPRLFHKPPLAF

SEQ ID NO: 615 - protein, 13 aa, Artificial Sequence
  source: /note="Description of Artificial Sequence: Synthetic peptide"
  MOD_RES (1)..(1): PyroGlu
  MOD_RES (4)..(4): hArg
  MOD_RES (11)..(11): Nle
  MOD_RES (12)..(12): 1-Nal
ERPRLFHKGPLAF

SEQ ID NO: 616 - protein, 13 aa, Artificial Sequence
  source: /note="Description of Artificial Sequence: Synthetic peptide"
  MOD_RES (1)..(1): PyroGlu
  MOD_RES (4)..(4): hArg
  MOD_RES (11)..(11): Nle
  MOD_RES (12)..(12): 1-Nal
ERPRLFKKPPLAF

SEQ ID NO: 617 - protein, 13 aa, Artificial Sequence
  source: /note="Description of Artificial Sequence: Synthetic peptide"
  MOD_RES (1)..(1): PyroGlu
  MOD_RES (5)..(5): Chg
  MOD_RES (11)..(11): Nle
  MOD_RES (12)..(12): 1-Nal
ERPRGSHKPPLAF

SEQ ID NO: 618 - protein, 13 aa, Artificial Sequence
  source: /note="Description of Artificial Sequence: Synthetic peptide"
  MOD_RES (1)..(1): PyroGlu
  MOD_RES (5)..(5): Chg
  MOD_RES (11)..(11): Nle
  MOD_RES (12)..(12): 1-Nal
ERPRGFHKPPLAF

SEQ ID NO: 619 - protein, 13 aa, Artificial Sequence
  source: /note="Description of Artificial Sequence: Synthetic peptide"
  MOD_RES (1)..(1): PyroGlu
  MOD_RES (5)..(5): Chg
  MOD_RES (11)..(11): Nle
  MOD_RES (12)..(12): 1-Nal
ERPRGFHKGPLAF

SEQ ID NO: 620 - protein, 13 aa, Artificial Sequence
  source: /note="Description of Artificial Sequence: Synthetic peptide"
  MOD_RES (1)..(1): PyroGlu
  MOD_RES (5)..(5): Chg
  MOD_RES (11)..(11): Nle
  MOD_RES (12)..(12): 1-Nal
ERPRGFKKPPLAF

SEQ ID NO: 621 - protein, 13 aa, Artificial Sequence
  source: /note="Description of Artificial Sequence: Synthetic peptide"
  MOD_RES (1)..(1): PyroGlu
  MOD_RES (5)..(5): Chg
  MOD_RES (11)..(11): Nle
ERPRGFKKPPLPF

SEQ ID NO: 622 - protein, 13 aa, Artificial Sequence
  source: /note="Description of Artificial Sequence: Synthetic peptide"
  MOD_RES (1)..(1): PyroGlu
  MOD_RES (5)..(5): Cha
  MOD_RES (12)..(12): 1-Nal
ERPRAFHKPPMAF

SEQ ID NO: 623 - protein, 13 aa, Artificial Sequence
  source: /note="Description of Artificial Sequence: Synthetic peptide"
  MOD_RES (1)..(1): PyroGlu
  MOD_RES (5)..(5): Cha
  MOD_RES (12)..(12): 1-Nal
ERPRAFHKGPMAF

SEQ ID NO: 624 - protein, 13 aa, Artificial Sequence
  source: /note="Description of Artificial Sequence: Synthetic peptide"
  MOD_RES (1)..(1): PyroGlu
  MOD_RES (5)..(5): Cha
  MOD_RES (12)..(12): 1-Nal
ERPRAFKKPPMAF

SEQ ID NO: 625 - protein, 13 aa, Artificial Sequence
  source: /note="Description of Artificial Sequence: Synthetic peptide"
  MOD_RES (1)..(1): PyroGlu
  MOD_RES (5)..(5): Cha
ERPRAFKKPPMPF

SEQ ID NO: 626 - protein, 13 aa, Artificial Sequence
  source: /note="Description of Artificial Sequence: Synthetic peptide"
  MOD_RES (1)..(1): PyroGlu
  MOD_RES (4)..(4): hArg
  MOD_RES (5)..(5): Cha
ERPRAFHKPPMPF

SEQ ID NO: 627 - protein, 13 aa, Artificial Sequence
  source: /note="Description of Artificial Sequence: Synthetic peptide"
  MOD_RES (1)..(1): PyroGlu
  MOD_RES (4)..(4): hArg
  MOD_RES (5)..(5): Cha
  MOD_RES (12)..(12): 1-Nal
ERPRASHKPPMAF

SEQ ID NO: 628 - protein, 13 aa, Artificial Sequence
  source: /note="Description of Artificial Sequence: Synthetic peptide"
  MOD_RES (1)..(1): PyroGlu
  MOD_RES (4)..(4): hArg
  MOD_RES (5)..(5): Cha
  MOD_RES (12)..(12): 1-Nal
ERPRAFHKPPMAF

SEQ ID NO: 629 - protein, 13 aa, Artificial Sequence
  source: /note="Description of Artificial Sequence: Synthetic peptide"
  MOD_RES (1)..(1): PyroGlu
  MOD_RES (4)..(4): hArg
  MOD_RES (5)..(5): Cha
  MOD_RES (12)..(12): 1-Nal
ERPRAFHKGPMAF

SEQ ID NO: 630 - protein, 13 aa, Artificial Sequence
  source: /note="Description of Artificial Sequence: Synthetic peptide"
  MOD_RES (1)..(1): PyroGlu
  MOD_RES (4)..(4): hArg
  MOD_RES (5)..(5): Cha
  MOD_RES (12)..(12): 1-Nal
ERPRAFKKPPMAF

SEQ ID NO: 631 - protein, 13 aa, Artificial Sequence
  source: /note="Description of Artificial Sequence: Synthetic peptide"
  MOD_RES (1)..(1): PyroGlu
  MOD_RES (4)..(4): hArg
  MOD_RES (5)..(5): Cha
ERPRAFKKPPMPF

SEQ ID NO: 632 - protein, 13 aa, Artificial Sequence
  source: /note="Description of Artificial Sequence: Synthetic peptide"
  MOD_RES (1)..(1): PyroGlu
  MOD_RES (4)..(4): hArg
  MOD_RES (12)..(12): 1-Nal
ERPRLFKKPPMAF

SEQ ID NO: 633 - protein, 13 aa, Artificial Sequence
  source: /note="Description of Artificial Sequence: Synthetic peptide"
  MOD_RES (1)..(1): PyroGlu
  MOD_RES (4)..(4): hArg
ERPRLFKKPPMPF

SEQ ID NO: 634 - protein, 13 aa, Artificial Sequence
  source: /note="Description of Artificial Sequence: Synthetic peptide"
  MOD_RES (1)..(1): PyroGlu
  MOD_RES (12)..(12): 1-Nal
ERPRLFKKPPMAF

SEQ ID NO: 635 - protein, 13 aa, Artificial Sequence
  source: /note="Description of Artificial Sequence: Synthetic peptide"
  MOD_RES (1)..(1): PyroGlu
  MOD_RES (5)..(5): Chg
  MOD_RES (12)..(12): 1-Nal
ERPRGFHKPPMAF

SEQ ID NO: 636 - protein, 13 aa, Artificial Sequence
  source: /note="Description of Artificial Sequence: Synthetic peptide"
  MOD_RES (1)..(1): PyroGlu
  MOD_RES (5)..(5): Chg
  MOD_RES (12)..(12): 1-Nal
ERPRGFHKGPMAF

SEQ ID NO: 637 - protein, 13 aa, Artificial Sequence
  source: /note="Description of Artificial Sequence: Synthetic peptide"
  MOD_RES (1)..(1): PyroGlu
  MOD_RES (5)..(5): Chg
  MOD_RES (12)..(12): 1-Nal
ERPRGFKKPPMAF

SEQ ID NO: 638 - protein, 13 aa, Artificial Sequence
  source: /note="Description of Artificial Sequence: Synthetic peptide"
  MOD_RES (1)..(1): PyroGlu
  MOD_RES (5)..(5): Chg
ERPRGFKKPPMPF

SEQ ID NO: 639 - protein, 13 aa, Artificial Sequence
  source: /note="Description of Artificial Sequence: Synthetic peptide"
  MOD_RES (1)..(1): PyroGlu
  MOD_RES (8)..(8): 1-Nal
  MOD_RES (12)..(12): 1-Nal
ERPRLFKAPPMAF

SEQ ID NO: 640 - protein, 13 aa, Artificial Sequence
  source: /note="Description of Artificial Sequence: Synthetic peptide"
  MOD_RES (1)..(1): PyroGlu
  MOD_RES (5)..(5): NMeLeu
  MOD_RES (12)..(12): 1-Nal
ERPRLFHKPPMAF

SEQ ID NO: 641 - protein, 13 aa, Artificial Sequence
  source: /note="Description of Artificial Sequence: Synthetic peptide"
  MOD_RES (1)..(1): PyroGlu
  MOD_RES (5)..(5): NMeLeu
  MOD_RES (12)..(12): 1-Nal
ERPRLFHKGPMAF

SEQ ID NO: 642 - protein, 13 aa, Artificial Sequence
  source: /note="Description of Artificial Sequence: Synthetic peptide"
  MOD_RES (1)..(1): PyroGlu
  MOD_RES (5)..(5): NMeLeu
  MOD_RES (12)..(12): 1-Nal
ERPRLFKKPPMAF

SEQ ID NO: 643 - protein, 13 aa, Artificial Sequence
  source: /note="Description of Artificial Sequence: Synthetic peptide"
  MOD_RES (1)..(1): PyroGlu
  MOD_RES (5)..(5): NMeLeu
ERPRLFKKPPMPF

SEQ ID NO: 644 - protein, 13 aa, Artificial Sequence
  source: /note="Description of Artificial Sequence: Synthetic peptide"
  MOD_RES (1)..(1): PyroGlu
  MOD_RES (5)..(5): Cha
  MOD_RES (12)..(12): 1-Nal
ERPRASHKPPFAF

SEQ ID NO: 645 - protein, 13 aa, Artificial Sequence
  source: /note="Description of Artificial Sequence: Synthetic peptide"
  MOD_RES (1)..(1): PyroGlu
ERPRLFKKPPMPF

SEQ ID NO: 646 - protein, 13 aa, Artificial Sequence
  source: /note="Description of Artificial Sequence: Synthetic peptide"
  MOD_RES (1)..(1): PyroGlu
  MOD_RES (5)..(5): Cha
  MOD_RES (12)..(12): 1-Nal
ERPRAFHKPPFAF

SEQ ID NO: 647 - protein, 13 aa, Artificial Sequence
  source: /note="Description of Artificial Sequence: Synthetic peptide"
  MOD_RES (1)..(1): PyroGlu
  MOD_RES (5)..(5): Cha
  MOD_RES (12)..(12): 1-Nal
ERPRAFHKGPFAF

SEQ ID NO: 648 - protein, 13 aa, Artificial Sequence
  source: /note="Description of Artificial Sequence: Synthetic peptide"
  MOD_RES (1)..(1): PyroGlu
  MOD_RES (5)..(5): Cha
  MOD_RES (12)..(12): 1-Nal
ERPRAFKKPPFAF

SEQ ID NO: 649 - protein, 13 aa, Artificial Sequence
  source: /note="Description of Artificial Sequence: Synthetic peptide"
  MOD_RES (1)..(1): PyroGlu
  MOD_RES (5)..(5): Cha
ERPRAFKKPPFPF

SEQ ID NO: 650 - protein, 13 aa, Artificial Sequence
  source: /note="Description of Artificial Sequence: Synthetic peptide"
  MOD_RES (1)..(1): PyroGlu
  MOD_RES (4)..(4): hArg
  MOD_RES (5)..(5): Cha
ERPRASHKPPFPF

SEQ ID NO: 651 - protein, 13 aa, Artificial Sequence
  source: /note="Description of Artificial Sequence: Synthetic peptide"
  MOD_RES (1)..(1): PyroGlu
  MOD_RES (4)..(4): hArg
  MOD_RES (5)..(5): Cha
ERPRAFHKPPFPF

SEQ ID NO: 652 - protein, 13 aa, Artificial Sequence
  source: /note="Description of Artificial Sequence: Synthetic peptide"
  MOD_RES (1)..(1): PyroGlu
  MOD_RES (4)..(4): hArg
  MOD_RES (5)..(5): Cha
  MOD_RES (12)..(12): 1-Nal
ERPRASHKPPFAF

SEQ ID NO: 653 - protein, 13 aa, Artificial Sequence
  source: /note="Description of Artificial Sequence: Synthetic peptide"
  MOD_RES (1)..(1): PyroGlu
  MOD_RES (4)..(4): hArg
  MOD_RES (5)..(5): Cha
  MOD_RES (12)..(12): 1-Nal
ERPRAFHKPPFAF

SEQ ID NO: 654 - protein, 13 aa, Artificial Sequence
  source: /note="Description of Artificial Sequence: Synthetic peptide"
  MOD_RES (1)..(1): PyroGlu
  MOD_RES (4)..(4): hArg
  MOD_RES (5)..(5): Cha
  MOD_RES (12)..(12): 1-Nal
ERPRAFHKGPFAF

SEQ ID NO: 655 - protein, 13 aa, Artificial Sequence
  source: /note="Description of Artificial Sequence: Synthetic peptide"
  MOD_RES (1)..(1): PyroGlu
  MOD_RES (4)..(4): hArg
  MOD_RES (5)..(5): Cha
  MOD_RES (12)..(12): 1-Nal
ERPRAFKKPPFAF

SEQ ID NO: 656 - protein, 13 aa, Artificial Sequence
  source: /note="Description of Artificial Sequence: Synthetic peptide"
  MOD_RES (1)..(1): PyroGlu
  MOD_RES (4)..(4): hArg
  MOD_RES (5)..(5): Cha
ERPRAFKKPPFPF

SEQ ID NO: 657 - protein, 13 aa, Artificial Sequence
  source: /note="Description of Artificial Sequence: Synthetic peptide"
  MOD_RES (1)..(1): PyroGlu
  MOD_RES (4)..(4): hArg
ERPRLFHKPPFPF

SEQ ID NO: 658 - protein, 13 aa, Artificial Sequence
  source: /note="Description of Artificial Sequence: Synthetic peptide"
  MOD_RES (1)..(1): PyroGlu
  MOD_RES (5)..(5): NMeLeu
  MOD_RES (11)..(11): Nle
ERPRLFKKPPLPF

SEQ ID NO: 659 - protein, 13 aa, Artificial Sequence
  source: /note="Description of Artificial Sequence: Synthetic peptide"
  MOD_RES (1)..(1): PyroGlu
  MOD_RES (11)..(11): pI-Phe
ERPRLFHKPPFPF

SEQ ID NO: 660 - protein, 13 aa, Artificial Sequence
  source: /note="Description of Artificial Sequence: Synthetic peptide"
  MOD_RES (1)..(1): PyroGlu
  MOD_RES (11)..(11): pI-Phe
  MOD_RES (12)..(12): 1-Nal
ERPRLFHKPPFAF

SEQ ID NO: 661 - protein, 13 aa, Artificial Sequence
  source: /note="Description of Artificial Sequence: Synthetic peptide"
  MOD_RES (1)..(1): PyroGlu
  MOD_RES (4)..(4): hArg
  MOD_RES (11)..(11): pI-Phe
ERPRLFHKPPFPF

SEQ ID NO: 662 - protein, 13 aa, Artificial Sequence
  source: /note="Description of Artificial Sequence: Synthetic peptide"
  MOD_RES (1)..(1): PyroGlu
  MOD_RES (4)..(4): hArg
  MOD_RES (11)..(11): pI-Phe
  MOD_RES (12)..(12): 1-Nal
ERPRLSHKPPFAF

SEQ ID NO: 663 - protein, 13 aa, Artificial Sequence
  source: /note="Description of Artificial Sequence: Synthetic peptide"
  MOD_RES (1)..(1): PyroGlu
  MOD_RES (4)..(4): hArg
  MOD_RES (11)..(11): pI-Phe
  MOD_RES (12)..(12): 1-Nal
ERPRLFHKPPFAF

SEQ ID NO: 664 - protein, 13 aa, Artificial Sequence
  source: /note="Description of Artificial Sequence: Synthetic peptide"
  MOD_RES (1)..(1): PyroGlu
  MOD_RES (5)..(5): NMeLeu
  MOD_RES (11)..(11): Nle
ERPRLFHKPPLPF

SEQ ID NO: 665 - protein, 13 aa, Artificial Sequence
  source: /note="Description of Artificial Sequence: Synthetic peptide"
  MOD_RES (1)..(1): PyroGlu
  MOD_RES (5)..(5): NMeLeu
  MOD_RES (11)..(11): Nle
  MOD_RES (12)..(12): 1-Nal
ERPRLSHKPPLAF

SEQ ID NO: 666 - protein, 13 aa, Artificial Sequence
  source: /note="Description of Artificial Sequence: Synthetic peptide"
  MOD_RES (1)..(1): PyroGlu
  MOD_RES (5)..(5): NMeLeu
  MOD_RES (8)..(8): 1-Nal
  MOD_RES (11)..(11): Nle
ERPRLSHAPPLMF

SEQ ID NO: 667 - protein, 13 aa, Artificial Sequence
  source: /note="Description of Artificial Sequence: Synthetic peptide"
  MOD_RES (1)..(1): PyroGlu
  MOD_RES (5)..(5): NMeLeu
  MOD_RES (11)..(11): Nle
  MOD_RES (12)..(12): 1-Nal
ERPRLFHKPPLAF

SEQ ID NO: 668 - protein, 13 aa, Artificial Sequence
  source: /note="Description of Artificial Sequence: Synthetic peptide"
  MOD_RES (1)..(1): PyroGlu
  MOD_RES (5)..(5): NMeLeu
  MOD_RES (11)..(11): Nle
  MOD_RES (12)..(12): 1-Nal
ERPRLFHKGPLAF

SEQ ID NO: 669 - protein, 13 aa, Artificial Sequence
  source: /note="Description of Artificial Sequence: Synthetic peptide"
  MOD_RES (1)..(1): PyroGlu
  MOD_RES (5)..(5): Cha
  MOD_RES (11)..(11): pI-Phe
ERPRAFKKPPFPF

SEQ ID NO: 670 - protein, 13 aa, Artificial Sequence
  source: /note="Description of Artificial Sequence: Synthetic peptide"
  MOD_RES (1)..(1): PyroGlu
  MOD_RES (4)..(4): hArg
  MOD_RES (5)..(5): Cha
  MOD_RES (11)..(11): pI-Phe
ERPRASHKPPFPF

SEQ ID NO: 671 - protein, 13 aa, Artificial Sequence
  source: /note="Description of Artificial Sequence: Synthetic peptide"
  MOD_RES (1)..(1): PyroGlu
  MOD_RES (4)..(4): hArg
  MOD_RES (5)..(5): Cha
  MOD_RES (11)..(11): pI-Phe
ERPRAFHKPPFPF

SEQ ID NO: 672 - protein, 13 aa, Artificial Sequence
  source: /note="Description of Artificial Sequence: Synthetic peptide"
  MOD_RES (1)..(1): PyroGlu
  MOD_RES (4)..(4): hArg
  MOD_RES (5)..(5): NMeLeu
  MOD_RES (11)..(11): pI-Phe
  MOD_RES (13)..(13): 4-F-F
ERPRLSHKGPFPF

SEQ ID NO: 673 - protein, 13 aa, Artificial Sequence
  source: /note="Description of Artificial Sequence: Synthetic peptide"
  MOD_RES (1)..(1): PyroGlu
  MOD_RES (4)..(4): hArg
  MOD_RES (5)..(5): Cha
  MOD_RES (11)..(11): pI-Phe
  MOD_RES (13)..(13): 4-F-F
ERPRASHKGPFPF

SEQ ID NO: 674 - protein, 12 aa, Artificial Sequence
  source: /note="Description of Artificial Sequence: Synthetic peptide"
  MOD_RES (1)..(1): PyroGlu
  MOD_RES (4)..(4): hArg
  MOD_RES (5)..(5): Cha
  MOD_RES (11)..(11): Nle
  MOD_RES (12)..(12): 4-F-F
ERPRASHKGPLF

SEQ ID NO: 675 - protein, 13 aa, Artificial Sequence
  source: /note="Description of Artificial Sequence: Synthetic peptide"
  MOD_RES (1)..(1): PyroGlu
  MOD_RES (4)..(4): hArg
  MOD_RES (5)..(5): NMeLeu
  MOD_RES (11)..(11): pI-Phe
  MOD_RES (13)..(13): 4-Me-F
ERPRLSHKGPFPF

SEQ ID NO: 676 - protein, 13 aa, Artificial Sequence
  source: /note="Description of Artificial Sequence: Synthetic peptide"
  MOD_RES (1)..(1): PyroGlu
  MOD_RES (4)..(4): hArg
  MOD_RES (5)..(5): Cha
  MOD_RES (11)..(11): pI-Phe
  MOD_RES (13)..(13): 4-Me-F
ERPRASHKGPFPF

SEQ ID NO: 677 - protein, 13 aa, Artificial Sequence
  source: /note="Description of Artificial Sequence: Synthetic peptide"
  MOD_RES (1)..(1): PyroGlu
  MOD_RES (4)..(4): hArg
  MOD_RES (5)..(5): Cha
  MOD_RES (11)..(11): Nle
  MOD_RES (13)..(13): 4-Me-F
ERPRASHKGPLPF

SEQ ID NO: 678 - protein, 12 aa, Artificial Sequence
  source: /note="Description of Artificial Sequence: Synthetic peptide"
  MOD_RES (1)..(1): PyroGlu
  MOD_RES (4)..(4): hArg
  MOD_RES (5)..(5): Cha
  MOD_RES (11)..(11): Nle
  MOD_RES (12)..(12): 4-Me-F
ERPRASHKGPLF

SEQ ID NO: 679 - protein, 13 aa, Artificial Sequence
  source: /note="Description of Artificial Sequence: Synthetic peptide"
  MOD_RES (1)..(1): PyroGlu
  MOD_RES (4)..(4): hArg
  MOD_RES (5)..(5): Cha
  MOD_RES (11)..(11): Nle
  MOD_RES (13)..(13): D-Bip
ERPRASHKGPLPF

SEQ ID NO: 680 - protein, 12 aa, Artificial Sequence
  source: /note="Description of Artificial Sequence: Synthetic peptide"
  MOD_RES (1)..(1): PyroGlu
  MOD_RES (4)..(4): hArg
  MOD_RES (5)..(5): Cha
  MOD_RES (11)..(11): Nle
  MOD_RES (12)..(12): D-Bip
ERPRASHKGPLF

SEQ ID NO: 681 - protein, 13 aa, Artificial Sequence
  source: /note="Description of Artificial Sequence: Synthetic peptide"
  MOD_RES (1)..(1): PyroGlu
  MOD_RES (4)..(4): hArg
  MOD_RES (5)..(5): NMeLeu
  MOD_RES (11)..(11): Nle
  MOD_RES (13)..(13): D-1Nal
ERPRLSHKGPLPA

SEQ ID NO: 682 - protein, 13 aa, Artificial Sequence
  source: /note="Description of Artificial Sequence: Synthetic peptide"
  MOD_RES (1)..(1): PyroGlu
  MOD_RES (4)..(4): hArg
  MOD_RES (5)..(5): NMeLeu
  MOD_RES (11)..(11): pI-Phe
  MOD_RES (13)..(13): D-1Nal
ERPRLSHKGPFPA

SEQ ID NO: 683 - protein, 13 aa, Artificial Sequence
  source: /note="Description of Artificial Sequence: Synthetic peptide"
  MOD_RES (1)..(1): PyroGlu
  MOD_RES (4)..(4): hArg
  MOD_RES (5)..(5): Cha
  MOD_RES (11)..(11): pI-Phe
  MOD_RES (13)..(13): D-1Nal
ERPRASHKGPFPA

SEQ ID NO: 684 - protein, 13 aa, Artificial Sequence
  source: /note="Description of Artificial Sequence: Synthetic peptide"
  MOD_RES (1)..(1): PyroGlu
  MOD_RES (4)..(4): hArg
  MOD_RES (5)..(5): Cha
  MOD_RES (11)..(11): Nle
  MOD_RES (13)..(13): D-1Nal
ERPRASHKGPLPA

SEQ ID NO: 685 - protein, 13 aa, Artificial Sequence
  source: /note="Description of Artificial Sequence: Synthetic peptide"
  MOD_RES (1)..(1): PyroGlu
  MOD_RES (4)..(4): hArg
  MOD_RES (5)..(5): Cha
  MOD_RES (11)..(11): pI-Phe
  MOD_RES (12)..(12): 1-Nal
ERPRAFHKPPFAF

SEQ ID NO: 686 - protein, 13 aa, Artificial Sequence
  source: /note="Description of Artificial Sequence: Synthetic peptide"
  MOD_RES (1)..(1): PyroGlu
  MOD_RES (4)..(4): hArg
  MOD_RES (5)..(5): Cha
  MOD_RES (11)..(11): pI-Phe
  MOD_RES (13)..(13): pI-Phe
ERPRASHKGPFPF

SEQ ID NO: 687 - protein, 13 aa, Artificial Sequence
  source: /note="Description of Artificial Sequence: Synthetic peptide"
  MOD_RES (1)..(1): PyroGlu
  MOD_RES (4)..(4): hArg
  MOD_RES (5)..(5): Cha
  MOD_RES (11)..(11): pI-Phe
  MOD_RES (12)..(12): 1-Nal
ERPRAFHKGPFAF

SEQ ID NO: 688 - protein, 13 aa, Artificial Sequence
  source: /note="Description of Artificial Sequence: Synthetic peptide"
  MOD_RES (1)..(1): PyroGlu
  MOD_RES (5)..(5): Cha
  MOD_RES (11)..(11): pI-Phe
ERPRASHKGPFPY

SEQ ID NO: 689 - protein, 13 aa, Artificial Sequence
  source: /note="Description of Artificial Sequence: Synthetic peptide"
  MOD_RES (1)..(1): PyroGlu
  MOD_RES (4)..(4): hArg
  MOD_RES (5)..(5): Cha
  MOD_RES (11)..(11): pI-Phe
ERPRASHKGPFPY

SEQ ID NO: 690 - protein, 12 aa, Artificial Sequence
  source: /note="Description of Artificial Sequence: Synthetic peptide"
  MOD_RES (1)..(1): PyroGlu
  MOD_RES (4)..(4): hArg
  MOD_RES (5)..(5): Cha
  MOD_RES (11)..(11): Nle
  MOD_RES (12)..(12): D-Tyr
ERPRASHKGPLY

SEQ ID NO: 691 - protein, 13 aa, Artificial Sequence
  source: /note="Description of Artificial Sequence: Synthetic peptide"
  MOD_RES (1)..(1): PyroGlu
  MOD_RES (13)..(13): D-Tyr
ERPRLSHKGPMPY

SEQ ID NO: 692 - protein, 13 aa, Artificial Sequence
  source: /note="Description of Artificial Sequence: Synthetic peptide"
  MOD_RES (1)..(1): PyroGlu
  MOD_RES (4)..(4): hArg
  MOD_RES (5)..(5): Cha
  MOD_RES (11)..(11): pI-Phe
  MOD_RES (12)..(12): 1-Nal
ERPRAFKKPPFAF

SEQ ID NO: 693 - protein, 13 aa, Artificial Sequence
  source: /note="Description of Artificial Sequence: Synthetic peptide"
  MOD_RES (1)..(1): PyroGlu
  MOD_RES (5)..(5): Cha
  MOD_RES (11)..(11): pI-Phe
ERPRASHKPPFPF

SEQ ID NO: 694 - protein, 13 aa, Artificial Sequence
  source: /note="Description of Artificial Sequence: Synthetic peptide"
  MOD_RES (1)..(1): PyroGlu
  MOD_RES (4)..(4): hArg
  MOD_RES (5)..(5): Cha
  MOD_RES (11)..(11): pI-Phe
ERPRAFKKPPFPF

SEQ ID NO: 695 - protein, 13 aa, Artificial Sequence
  source: /note="Description of Artificial Sequence: Synthetic peptide"
  MOD_RES (1)..(1): PyroGlu
  MOD_RES (4)..(4): hArg
  MOD_RES (11)..(11): pI-Phe
  MOD_RES (12)..(12): 1-Nal
ERPRLFHKGPFAF

SEQ ID NO: 696 - protein, 13 aa, Artificial Sequence
  source: /note="Description of Artificial Sequence: Synthetic peptide"
  MOD_RES (1)..(1): PyroGlu
  MOD_RES (4)..(4): hArg
  MOD_RES (11)..(11): pI-Phe
  MOD_RES (12)..(12): 1-Nal
ERPRLFKKPPFAF

SEQ ID NO: 697 - protein, 13 aa, Artificial Sequence
  source: /note="Description of Artificial Sequence: Synthetic peptide"
  MOD_RES (1)..(1): PyroGlu
  MOD_RES (4)..(4): hArg
  MOD_RES (11)..(11): pI-Phe
ERPRLFKKPPFPF

SEQ ID NO: 698 - protein, 13 aa, Artificial Sequence
  source: /note="Description of Artificial Sequence: Synthetic peptide"
  MOD_RES (1)..(1): PyroGlu
  MOD_RES (5)..(5): Chg
  MOD_RES (11)..(11): pI-Phe
ERPRGFHKPPFPF

SEQ ID NO: 699 - protein, 13 aa, Artificial Sequence
  source: /note="Description of Artificial Sequence: Synthetic peptide"
  MOD_RES (1)..(1): PyroGlu
  MOD_RES (5)..(5): Cha
  MOD_RES (11)..(11): pI-Phe
ERPRAFHKPPFPF

SEQ ID NO: 700 - protein, 13 aa, Artificial Sequence
  source: /note="Description of Artificial Sequence: Synthetic peptide"
  MOD_RES (1)..(1): PyroGlu
  MOD_RES (5)..(5): Chg
  MOD_RES (11)..(11): pI-Phe
  MOD_RES (12)..(12): 1-Nal
ERPRGFHKPPFAF

SEQ ID NO: 701 - protein, 13 aa, Artificial Sequence
  source: /note="Description of Artificial Sequence: Synthetic peptide"
  MOD_RES (1)..(1): PyroGlu
  MOD_RES (5)..(5): Chg
  MOD_RES (11)..(11): pI-Phe
  MOD_RES (12)..(12): 1-Nal
ERPRGFKKPPFAF

SEQ ID NO: 702 - protein, 13 aa, Artificial Sequence
  source: /note="Description of Artificial Sequence: Synthetic peptide"
  MOD_RES (1)..(1): PyroGlu
  MOD_RES (5)..(5): NMeLeu
  MOD_RES (11)..(11): pI-Phe
ERPRLFHKPPFPF

SEQ ID NO: 703 - protein, 13 aa, Artificial Sequence
  source: /note="Description of Artificial Sequence: Synthetic peptide"
  MOD_RES (1)..(1): PyroGlu
  MOD_RES (5)..(5): NMeLeu
  MOD_RES (11)..(11): pI-Phe
  MOD_RES (12)..(12): 1-Nal
ERPRLSHKPPFAF

SEQ ID NO: 704 - protein, 13 aa, Artificial Sequence
  source: /note="Description of Artificial Sequence: Synthetic peptide"
  MOD_RES (1)..(1): PyroGlu
  MOD_RES (5)..(5): Cha
  MOD_RES (11)..(11): pI-Phe
  MOD_RES (12)..(12): 1-Nal
ERPRASHKPPFAF

SEQ ID NO: 705 - protein, 13 aa, Artificial Sequence
  source: /note="Description of Artificial Sequence: Synthetic peptide"
  MOD_RES (1)..(1): PyroGlu
  MOD_RES (5)..(5): NMeLeu
  MOD_RES (11)..(11): pI-Phe
  MOD_RES (12)..(12): 1-Nal
ERPRLFHKPPFAF

SEQ ID NO: 706 - protein, 13 aa, Artificial Sequence
  source: /note="Description of Artificial Sequence: Synthetic peptide"
  MOD_RES (1)..(1): PyroGlu
  MOD_RES (5)..(5): NMeLeu
  MOD_RES (11)..(11): pI-Phe
  MOD_RES (12)..(12): 1-Nal
ERPRLFHKGPFAF

SEQ ID NO: 707 - protein, 13 aa, Artificial Sequence
  source: /note="Description of Artificial Sequence: Synthetic peptide"
  MOD_RES (1)..(1): PyroGlu
  MOD_RES (5)..(5): NMeLeu
  MOD_RES (11)..(11): pI-Phe
  MOD_RES (12)..(12): 1-Nal
ERPRLFKKPPFAF

SEQ ID NO: 708 - protein, 13 aa, Artificial Sequence
  source: /note="Description of Artificial Sequence: Synthetic peptide"
  MOD_RES (1)..(1): PyroGlu
  MOD_RES (5)..(5): NMeLeu
  MOD_RES (11)..(11): pI-Phe
ERPRLFKKPPFPF

SEQ ID NO: 709 - protein, 13 aa, Artificial Sequence
  source: /note="Description of Artificial Sequence: Synthetic peptide"
  MOD_RES (1)..(1): PyroGlu
  MOD_RES (5)..(5): Cha
  MOD_RES (11)..(11): pI-Phe
  MOD_RES (12)..(12): 1-Nal
ERPRAFHKPPFAF

SEQ ID NO: 710 - protein, 13 aa, Artificial Sequence
  source: /note="Description of Artificial Sequence: Synthetic peptide"
  MOD_RES (1)..(1): PyroGlu
  MOD_RES (5)..(5): Cha
  MOD_RES (11)..(11): pI-Phe
  MOD_RES (12)..(12): 1-Nal
ERPRAFKKPPFAF

SEQ ID NO: 711 - protein, 13 aa, Artificial Sequence
  source: /note="Description of Artificial Sequence: Synthetic peptide"
  MOD_RES (1)..(1): PyroGlu
  MOD_RES (4)..(4): hArg
  MOD_RES (5)..(5): Cha
  MOD_RES (11)..(11): Nle
  MOD_RES (13)..(13): pI-Phe
ERPRASHKGPLPF

SEQ ID NO: 712 - protein, 13 aa, Artificial Sequence
  source: /note="Description of Artificial Sequence: Synthetic peptide"
  MOD_RES (1)..(1): PyroGlu
  MOD_RES (4)..(4): hArg
  MOD_RES (5)..(5): Cha
  MOD_RES (11)..(11): pI-Phe
  MOD_RES (13)..(13): D-Phe
ERPRASHKGPFPF

SEQ ID NO: 713 - protein, 13 aa, Artificial Sequence
  source: /note="Description of Artificial Sequence: Synthetic peptide"
  MOD_RES (1)..(1): PyroGlu
  MOD_RES (4)..(4): hArg
  MOD_RES (5)..(5): Cha
  MOD_RES (11)..(11): Nle
  MOD_RES (13)..(13): D-Phe
ERPRASHKGPLPF

SEQ ID NO: 714 - protein, 13 aa, Artificial Sequence
  source: /note="Description of Artificial Sequence: Synthetic peptide"
  MOD_RES (1)..(1): PyroGlu
  MOD_RES (4)..(4): hArg
  MOD_RES (5)..(5): NMeLeu
  MOD_RES (11)..(11): Nle
  MOD_RES (13)..(13): NMePhe
  source: /note="C-term Amide"
ERPRLSHKGPLPF

SEQ ID NO: 715 - protein, 13 aa, Artificial Sequence
  source: /note="Description of Artificial Sequence: Synthetic peptide"
  MOD_RES (1)..(1): PyroGlu
  MOD_RES (4)..(4): hArg
  MOD_RES (5)..(5): NMeLeu
  MOD_RES (11)..(11): Nle
  MOD_RES (13)..(13): D-Trp
ERPRLSHKGPLPW

SEQ ID NO: 716 - protein, 13 aa, Artificial Sequence
  source: /note="Description of Artificial Sequence: Synthetic peptide"
  MOD_RES (1)..(1): PyroGlu
  MOD_RES (4)..(4): hArg
  MOD_RES (5)..(5): NMeLeu
  MOD_RES (11)..(11): pI-Phe
  MOD_RES (13)..(13): D-Trp
ERPRLSHKGPFPW

SEQ ID NO: 717 - protein, 13 aa, Artificial Sequence
  source: /note="Description of Artificial Sequence: Synthetic peptide"
  MOD_RES (1)..(1): PyroGlu
  MOD_RES (4)..(4): hArg
  MOD_RES (5)..(5): Cha
  MOD_RES (11)..(11): pI-Phe
  MOD_RES (13)..(13): D-Trp
ERPRASHKGPFPW

SEQ ID NO: 718 - protein, 13 aa, Artificial Sequence
  source: /note="Description of Artificial Sequence: Synthetic peptide"
  MOD_RES (1)..(1): PyroGlu
  MOD_RES (4)..(4): hArg
  MOD_RES (5)..(5): Cha
  MOD_RES (11)..(11): Nle
  MOD_RES (13)..(13): D-Trp
ERPRASHKGPLPW

SEQ ID NO: 719 - protein, 13 aa, Artificial Sequence
  source: /note="Description of Artificial Sequence: Synthetic peptide"
  MOD_RES (1)..(1): PyroGlu
  MOD_RES (4)..(4): hArg
  MOD_RES (5)..(5): Cha
  MOD_RES (11)..(11): Nle
ERPRASHKGPLPY

SEQ ID NO: 720 - protein, 13 aa, Artificial Sequence
  source: /note="Description of Artificial Sequence: Synthetic peptide"
  MOD_RES (1)..(1): PyroGlu
  MOD_RES (4)..(4): hArg
  MOD_RES (5)..(5): NMeLeu
  MOD_RES (11)..(11): Nle
  MOD_RES (13)..(13): D-Tyr
ERPRLSHKGPLPY

SEQ ID NO: 721 - protein, 13 aa, Artificial Sequence
  source: /note="Description of Artificial Sequence: Synthetic peptide"
  MOD_RES (1)..(1): PyroGlu
  MOD_RES (4)..(4): hArg
  MOD_RES (5)..(5): NMeLeu
  MOD_RES (11)..(11): pI-Phe
  MOD_RES (13)..(13): D-Tyr
ERPRLSHKGPFPY

SEQ ID NO: 722 - protein, 13 aa, Artificial Sequence
  source: /note="Description of Artificial Sequence: Synthetic peptide"
  MOD_RES (1)..(1): PyroGlu
  MOD_RES (4)..(4): hArg
  MOD_RES (5)..(5): Cha
  MOD_RES (11)..(11): pI-Phe
  MOD_RES (13)..(13): D-Tyr
ERPRASHKGPFPY

SEQ ID NO: 723 - protein, 13 aa, Artificial Sequence
  source: /note="Description of Artificial Sequence: Synthetic peptide"
  MOD_RES (1)..(1): PyroGlu
  MOD_RES (4)..(4): hArg
  MOD_RES (5)..(5): Cha
  MOD_RES (11)..(11): Nle
  MOD_RES (13)..(13): D-Tyr
ERPRASHKGPLPY

SEQ ID NO: 724 - protein, 13 aa, Artificial Sequence
  source: /note="Description of Artificial Sequence: Synthetic peptide"
  MOD_RES (1)..(1): PyroGlu
  MOD_RES (4)..(4): hArg
  MOD_RES (5)..(5): NMeLeu
  MOD_RES (11)..(11): Nle
  MOD_RES (13)..(13): D-Bip
  source: /note="C-term Amide"
ERPRLSHKPPLPF

SEQ ID NO: 725 - protein, 13 aa, Artificial Sequence
  source: /note="Description of Artificial Sequence: Synthetic peptide"
  MOD_RES (1)..(1): PyroGlu
  MOD_RES (4)..(4): hArg
  MOD_RES (5)..(5): NMeLeu
  MOD_RES (11)..(11): pI-Phe
  MOD_RES (13)..(13): 2-Nal
ERPRLFHKGPFPA

SEQ ID NO: 726 - protein, 13 aa, Artificial Sequence
  source: /note="Description of Artificial Sequence: Synthetic peptide"
  MOD_RES (1)..(1): PyroGlu
  MOD_RES (4)..(4): hArg
  MOD_RES (5)..(5): NMeLeu
  MOD_RES (11)..(11): Nle
  MOD_RES (13)..(13): D-Bip
  source: /note="C-term Amide"
ERPRLFHKGPLPF

SEQ ID NO: 727 - protein, 13 aa, Artificial Sequence
  source: /note="Description of Artificial Sequence: Synthetic peptide"
  MOD_RES (1)..(1): PyroGlu
  MOD_RES (4)..(4): hArg
  MOD_RES (5)..(5): NMeLeu
  MOD_RES (11)..(11): Nle
  MOD_RES (13)..(13): D-Bip
ERPRLFHKGPLPF

SEQ ID NO: 728 - protein, 13 aa, Artificial Sequence
  source: /note="Description of Artificial Sequence: Synthetic peptide"
  MOD_RES (1)..(1): PyroGlu
  MOD_RES (4)..(4): hArg
  MOD_RES (5)..(5): NMeLeu
  MOD_RES (11)..(11): Nle
  MOD_RES (13)..(13): D-Bip
ERPRLFHKPPLPF

SEQ ID NO: 729 - protein, 13 aa, Artificial Sequence
  source: /note="Description of Artificial Sequence: Synthetic peptide"
  MOD_RES (1)..(1): PyroGlu
  MOD_RES (4)..(4): hArg
  MOD_RES (5)..(5): NMeLeu
  MOD_RES (11)..(11): pI-Phe
  MOD_RES (13)..(13): D-Bip
ERPRLFHKGPFPF

SEQ ID NO: 730 - protein, 13 aa, Artificial Sequence
  source: /note="Description of Artificial Sequence: Synthetic peptide"
  MOD_RES (1)..(1): PyroGlu
  MOD_RES (4)..(4): hArg
  MOD_RES (5)..(5): NMeLeu
  MOD_RES (11)..(11): Nle
  MOD_RES (13)..(13): D-Bip
  source: /note="C-term Amide"
ERPRLFHKPPLPF

SEQ ID NO: 731 - protein, 13 aa, Artificial Sequence
  source: /note="Description of Artificial Sequence: Synthetic peptide"
  MOD_RES (1)..(1): PyroGlu
  MOD_RES (4)..(4): hArg
  MOD_RES (5)..(5): NMeLeu
  MOD_RES (11)..(11): pI-Phe
  MOD_RES (13)..(13): D-Bip
ERPRLSHKPPFPF

SEQ ID NO: 732 - protein, 13 aa, Artificial Sequence
  source: /note="Description of Artificial Sequence: Synthetic peptide"
  source: /note="N-term Palmitoyl"
  MOD_RES (4)..(4): hArg
  MOD_RES (5)..(5): NMeLeu
  MOD_RES (11)..(11): Nle
  MOD_RES (13)..(13): D-Bip
LRPRLFHKGPLPF

SEQ ID NO: 733 - protein, 13 aa, Artificial Sequence
  source: /note="Description of Artificial Sequence: Synthetic peptide"
  MOD_RES (1)..(1): PyroGlu
  MOD_RES (4)..(4): hArg
  MOD_RES (5)..(5): Cha
  MOD_RES (11)..(11): pI-Phe
  MOD_RES (13)..(13): D-Bip
ERPRASHKGPFPF

SEQ ID NO: 734 - protein, 13 aa, Artificial Sequence
  source: /note="Description of Artificial Sequence: Synthetic peptide"
  MOD_RES (1)..(1): PyroGlu
  MOD_RES (4)..(4): hArg
  MOD_RES (5)..(5): NMeLeu
  MOD_RES (11)..(11): Nle
  MOD_RES (13)..(13): 4-Me-F
ERPRLSHKGPLPF

SEQ ID NO: 735 - protein, 13 aa, Artificial Sequence
  source: /note="Description of Artificial Sequence: Synthetic peptide"
  MOD_RES (1)..(1): PyroGlu
  MOD_RES (4)..(4): hArg
  MOD_RES (5)..(5): NMeLeu
  MOD_RES (11)..(11): pI-Phe
  MOD_RES (13)..(13): D-Bip
  source: /note="C-term Amide"
ERPRLFHKGPFPF

SEQ ID NO: 736 - protein, 13 aa, Artificial Sequence
  source: /note="Description of Artificial Sequence: Synthetic peptide"
  MOD_RES (1)..(1): PyroGlu
  MOD_RES (4)..(4): hArg
  MOD_RES (5)..(5): Cha
  MOD_RES (11)..(11): Nle
  MOD_RES (13)..(13): D-Phe
  source: /note="C-term Amide"
ERPRASHKGPLPF

SEQ ID NO: 737 - protein, 13 aa, Artificial Sequence
  source: /note="Description of Artificial Sequence: Synthetic peptide"
  MOD_RES (1)..(1): PyroGlu
  MOD_RES (4)..(4): hArg
  MOD_RES (5)..(5): NMeLeu
  MOD_RES (11)..(11): Nle
  MOD_RES (13)..(13): 4-Cl-F
  source: /note="C-term Amide"
ERPRLSHKGPLPF

SEQ ID NO: 738 - protein, 13 aa, Artificial Sequence
  source: /note="Description of Artificial Sequence: Synthetic peptide"
  MOD_RES (1)..(1): PyroGlu
  MOD_RES (4)..(4): hArg
  MOD_RES (5)..(5): NMeLeu
  MOD_RES (11)..(11): Nle
  MOD_RES (13)..(13): 4-Me-F
  source: /note="C-term Amide"
ERPRLSHKGPLPF

SEQ ID NO: 739 - protein, 13 aa, Artificial Sequence
  source: /note="Description of Artificial Sequence: Synthetic peptide"
  MOD_RES (1)..(1): PyroGlu
  MOD_RES (4)..(4): hArg
  MOD_RES (5)..(5): NMeLeu
  MOD_RES (11)..(11): Nle
  MOD_RES (13)..(13): Bip
  source: /note="C-term Amide"
ERPRLSHKGPLPF

SEQ ID NO: 740 - protein, 13 aa, Artificial Sequence
  source: /note="Description of Artificial Sequence: Synthetic peptide"
  MOD_RES (1)..(1): PyroGlu
  MOD_RES (4)..(4): hArg
  MOD_RES (5)..(5): NMeLeu
  MOD_RES (11)..(11): Nle
  MOD_RES (13)..(13): D-Bip
  source: /note="C-term Amide"
ERPRLSHKGPLPF

SEQ ID NO: 741 - protein, 13 aa, Artificial Sequence
  source: /note="Description of Artificial Sequence: Synthetic peptide"
  MOD_RES (1)..(1): PyroGlu
  MOD_RES (4)..(4): hArg
  MOD_RES (5)..(5): NMeLeu
  MOD_RES (11)..(11): Nle
  MOD_RES (13)..(13): 4-NO2-F
  source: /note="C-term Amide"
ERPRLSHKGPLPF

SEQ ID NO: 742 - protein, 13 aa, Artificial Sequence
  source: /note="Description of Artificial Sequence: Synthetic peptide"
  MOD_RES (1)..(1): PyroGlu
  MOD_RES (4)..(4): hArg
  MOD_RES (5)..(5): NMeLeu
  MOD_RES (10)..(10): 1-Nal
  MOD_RES (11)..(11): Nle
  MOD_RES (13)..(13): 4-Cl-F
  source: /note="C-term Amide"
ERPRLSHKGALPF

SEQ ID NO: 743 - protein, 13 aa, Artificial Sequence
  source: /note="Description of Artificial Sequence: Synthetic peptide"
  MOD_RES (1)..(1): PyroGlu
  MOD_RES (4)..(4): hArg
  MOD_RES (5)..(5): NMeLeu
  MOD_RES (10)..(10): 1-Nal
  MOD_RES (11)..(11): Nle
  MOD_RES (13)..(13): 4-Cl-F
  source: /note="C-term Amide"
ERPRLFHKGALPF

SEQ ID NO: 744 - protein, 13 aa, Artificial Sequence
  source: /note="Description of Artificial Sequence: Synthetic peptide"
  MOD_RES (1)..(1): PyroGlu
  MOD_RES (4)..(4): hArg
  MOD_RES (5)..(5): NMeLeu
  MOD_RES (11)..(11): Nle
  MOD_RES (13)..(13): 4-Cl-F
  source: /note="C-term Amide"
ERPRLFHKGPLPF

SEQ ID NO: 745 - protein, 13 aa, Artificial Sequence
  source: /note="Description of Artificial Sequence: Synthetic peptide"
  MOD_RES (1)..(1): PyroGlu
  MOD_RES (4)..(4): hArg
  MOD_RES (5)..(5): NMeLeu
  MOD_RES (10)..(10): 1-Nal
  MOD_RES (11)..(11): Nle
  MOD_RES (13)..(13): 4-Cl-F
  source: /note="C-term Amide"
ERPRLSAKGALPF

SEQ ID NO: 746 - protein, 13 aa, Artificial Sequence
  source: /note="Description of Artificial Sequence: Synthetic peptide"
  MOD_RES (1)..(1): PyroGlu
  MOD_RES (4)..(4): hArg
  MOD_RES (5)..(5): NMeLeu
  MOD_RES (10)..(10): 1-Nal
  MOD_RES (11)..(11): Nle
  MOD_RES (13)..(13): 4-Cl-F
  source: /note="C-term Amide"
ERPRLFAKGALPF

SEQ ID NO: 747 - protein, 13 aa, Artificial Sequence
  source: /note="Description of Artificial Sequence: Synthetic peptide"
  MOD_RES (1)..(1): PyroGlu
  MOD_RES (4)..(4): hArg
  MOD_RES (5)..(5): NMeLeu
  MOD_RES (11)..(11): Nle
  MOD_RES (13)..(13): 4-Cl-F
  source: /note="C-term Amide"
ERPRLFAKGPLPF

SEQ ID NO: 748 - protein, 13 aa, Artificial Sequence
  source: /note="Description of Artificial Sequence: Synthetic peptide"
  MOD_RES (1)..(1): PyroGlu
  MOD_RES (4)..(4): hArg
  MOD_RES (5)..(5): NMeLeu
  MOD_RES (7)..(7): 1-Nal
  MOD_RES (10)..(10): 1-Nal
  MOD_RES (11)..(11): Nle
  MOD_RES (13)..(13): 4-Cl-F
  source: /note="C-term Amide"
ERPRLSAKGALPF

SEQ ID NO: 749 - protein, 13 aa, Artificial Sequence
  source: /note="Description of Artificial Sequence: Synthetic peptide"
  MOD_RES (1)..(1): PyroGlu
  MOD_RES (4)..(4): hArg
  MOD_RES (5)..(5): NMeLeu
  MOD_RES (7)..(7): 1-Nal
  MOD_RES (10)..(10): 1-Nal
  MOD_RES (11)..(11): Nle
  MOD_RES (13)..(13): 4-Cl-F
  source: /note="C-term Amide"
ERPRLFAKGALPF

SEQ ID NO: 750 - protein, 13 aa, Artificial Sequence
  source: /note="Description of Artificial Sequence: Synthetic peptide"
  MOD_RES (1)..(1): PyroGlu
  MOD_RES (4)..(4): hArg
  MOD_RES (5)..(5): NMeLeu
  MOD_RES (7)..(8): 1-Nal
  MOD_RES (10)..(10): 1-Nal
  MOD_RES (11)..(11): Nle
  MOD_RES (13)..(13): 4-Cl-F
  source: /note="C-term Amide"
ERPRLFAAGALPF

SEQ ID NO: 751 - protein, 13 aa, Artificial Sequence
  source: /note="Description of Artificial Sequence: Synthetic peptide"
  MOD_RES (1)..(1): PyroGlu
  MOD_RES (4)..(4): hArg
  MOD_RES (5)..(5): NMeLeu
  MOD_RES (7)..(7): 1-Nal
  MOD_RES (11)..(11): Nle
  MOD_RES (13)..(13): 4-Cl-F
  source: /note="C-term Amide"
ERPRLFAKGPLPF

SEQ ID NO: 752 - protein, 13 aa, Artificial Sequence
  source: /note="Description of Artificial Sequence: Synthetic peptide"
  MOD_RES (1)..(1): PyroGlu
  MOD_RES (4)..(4): hArg
  MOD_RES (5)..(5): NMeLeu
  MOD_RES (7)..(7): 1-Nal
  MOD_RES (11)..(11): Nle
  MOD_RES (13)..(13): 4-Cl-F
  source: /note="C-term Amide"
ERPRLFAKGPLPF

SEQ ID NO: 753 - protein, 13 aa, Artificial Sequence
  source: /note="Description of Artificial Sequence: Synthetic peptide"
  MOD_RES (1)..(1): PyroGlu
  MOD_RES (4)..(4): hArg
  MOD_RES (5)..(5): NMeLeu
  MOD_RES (6)..(6): NMePhe
  MOD_RES (7)..(8): 1-Nal
  MOD_RES (10)..(10): 1-Nal
  MOD_RES (11)..(11): Nle
  MOD_RES (13)..(13): 4-Cl-F
  source: /note="C-term Amide"
ERPRLFAAGALPF

SEQ ID NO: 754 - protein, 13 aa, Artificial Sequence
  source: /note="Description of Artificial Sequence: Synthetic peptide"
  MOD_RES (1)..(1): PyroGlu
  MOD_RES (4)..(4): hArg
  MOD_RES (5)..(5): NMeLeu
  MOD_RES (6)..(6): NMePhe
  MOD_RES (7)..(7): 1-Nal
  MOD_RES (11)..(11): Nle
  MOD_RES (13)..(13): 4-Cl-F
  source: /note="C-term Amide"
ERPRLFAKGPLPF

SEQ ID NO: 755 - protein, 13 aa, Artificial Sequence
  source: /note="Description of Artificial Sequence: Synthetic peptide"
  MOD_RES (1)..(1): PyroGlu
  MOD_RES (4)..(4): hArg
  MOD_RES (5)..(5): NMeLeu
  MOD_RES (6)..(6): NMePhe
  MOD_RES (10)..(10): 1-Nal
  MOD_RES (11)..(11): Nle
  MOD_RES (13)..(13): 4-Cl-F
  source: /note="C-term Amide"
ERPRLFAKGALPF

SEQ ID NO: 756 - protein, 13 aa, Artificial Sequence
  source: /note="Description of Artificial Sequence: Synthetic peptide"
  MOD_RES (1)..(1): PyroGlu
  MOD_RES (4)..(4): hArg
  MOD_RES (5)..(5): NMeLeu
  MOD_RES (6)..(6): NMePhe
  MOD_RES (10)..(10): 1-Nal
  MOD_RES (11)..(11): Nle
  MOD_RES (13)..(13): 4-Cl-F
  source: /note="C-term Amide"
ERPRLFAKGALPF

SEQ ID NO: 757 - protein, 13 aa, Artificial Sequence
  source: /note="Description of Artificial Sequence: Synthetic peptide"
  MOD_RES (1)..(1): PyroGlu
  MOD_RES (4)..(4): hArg
  MOD_RES (5)..(5): NMeLeu
  MOD_RES (7)..(7): 2-Nal
  MOD_RES (10)..(10): 1-Nal
  MOD_RES (11)..(11): Nle
  MOD_RES (13)..(13): 4-Cl-F
  source: /note="C-term Amide"
ERPRLSAKGALPF

SEQ ID NO: 758 - protein, 13 aa, Artificial Sequence
  source: /note="Description of Artificial Sequence: Synthetic peptide"
  MOD_RES (1)..(1): PyroGlu
  MOD_RES (4)..(4): hArg
  MOD_RES (5)..(5): NMeLeu
  MOD_RES (7)..(7): 2-Nal
  MOD_RES (10)..(10): 1-Nal
  MOD_RES (11)..(11): Nle
  MOD_RES (13)..(13): 4-Cl-F
  source: /note="C-term Amide"
ERPRLFAKGALPF

SEQ ID NO: 759 - protein, 13 aa, Artificial Sequence
  source: /note="Description of Artificial Sequence: Synthetic peptide"
  MOD_RES (1)..(1): PyroGlu
  MOD_RES (4)..(4): hArg
  MOD_RES (5)..(5): NMeLeu
  MOD_RES (7)..(7): 2-Nal
  MOD_RES (8)..(8): 1-Nal
  MOD_RES (10)..(10): 1-Nal
  MOD_RES (11)..(11): Nle
  MOD_RES (13)..(13): 4-Cl-F
  source: /note="C-term Amide"
ERPRLFAAGALPF

SEQ ID NO: 760 - protein, 13 aa, Artificial Sequence
  source: /note="Description of Artificial Sequence: Synthetic peptide"
  MOD_RES (1)..(1): PyroGlu
  MOD_RES (4)..(4): hArg
  MOD_RES (5)..(5): NMeLeu
  MOD_RES (7)..(7): 2-Nal
  MOD_RES (11)..(11): Nle
  MOD_RES (13)..(13): 4-Cl-F
  source: /note="C-term Amide"
ERPRLFAKGPLPF

SEQ ID NO: 761 - protein, 13 aa, Artificial Sequence
  source: /note="Description of Artificial Sequence: Synthetic peptide"
  MOD_RES (1)..(1): PyroGlu
  MOD_RES (4)..(4): hArg
  MOD_RES (5)..(5): NMeLeu
  MOD_RES (6)..(6): NMePhe
  MOD_RES (7)..(7): 2-Nal
  MOD_RES (11)..(11): Nle
  MOD_RES (13)..(13): 4-Cl-F
  source: /note="C-term Amide"
ERPRLFAKGPLPF

SEQ ID NO: 762 - protein, 13 aa, Artificial Sequence
  source: /note="Description of Artificial Sequence: Synthetic peptide"
  MOD_RES (1)..(1): PyroGlu
  MOD_RES (4)..(4): hArg
  MOD_RES (5)..(5): NMeLeu
  MOD_RES (11)..(11): Nle
ERPRLFHKPPLPF

SEQ ID NO: 763 - protein, 13 aa, Artificial Sequence
  source: /note="Description of Artificial Sequence: Synthetic peptide"
  MOD_RES (1)..(1): PyroGlu
  MOD_RES (4)..(4): hArg
  MOD_RES (5)..(5): NMeLeu
  MOD_RES (9)..(9): Thz
  MOD_RES (11)..(11): Nle
ERPRLFHKXPLPF

SEQ ID NO: 764 - protein, 12 aa, Artificial Sequence
  source: /note="Description of Artificial Sequence: Synthetic peptide"
  source: /note="N-term Palmitoyl"
  MOD_RES (3)..(3): hArg
  MOD_RES (4)..(4): NMeLeu
  MOD_RES (10)..(10): Nle
RPRLFHKPPLPF

SEQ ID NO: 765 - protein, 14 aa, Artificial Sequence
  source: /note="Description of Artificial Sequence: Synthetic peptide"
  MOD_RES (1)..(1): PyroGlu
  MOD_RES (4)..(4): hArg
  MOD_RES (5)..(5): NMeLeu
  MOD_RES (11)..(11): Nle
  MOD_RES (14)..(14): K(palmitoyl)
  source: /note="C-term Amide"
ERPRLFHKPPLPFK

SEQ ID NO: 766 - protein, 12 aa, Artificial Sequence
  source: /note="Description of Artificial Sequence: Synthetic peptide"
  source: /note="N-term Palmitoyl"
  MOD_RES (3)..(3): hArg
  MOD_RES (4)..(4): NMeLeu
  MOD_RES (10)..(10): Nle
  source: /note="C-term Amide"
RPRLFHKPPLPF

SEQ ID NO: 767 - protein, 13 aa, Artificial Sequence
  source: /note="Description of Artificial Sequence: Synthetic peptide"
  MOD_RES (1)..(1): PyroGlu
  MOD_RES (4)..(4): hArg
  MOD_RES (5)..(5): NMeLeu
  MOD_RES (11)..(11): Nle
  MOD_RES (13)..(13): D-Bip
ERPRLSHKGPLPF

SEQ ID NO: 768 - protein, 13 aa, Artificial Sequence
  source: /note="Description of Artificial Sequence: Synthetic peptide"
  MOD_RES (1)..(1): PyroGlu
  MOD_RES (4)..(4): hArg
  MOD_RES (5)..(5): NMeLeu
  MOD_RES (11)..(11): pI-Phe
  MOD_RES (13)..(13): D-Bip
ERPRLSHKGPFPF

SEQ ID NO: 769 - protein, 13 aa, Artificial Sequence
  source: /note="Description of Artificial Sequence: Synthetic peptide"
  MOD_RES (1)..(1): PyroGlu
  MOD_RES (4)..(4): hArg
  MOD_RES (5)..(5): NMeLeu
  MOD_RES (11)..(11): pI-Phe
  MOD_RES (13)..(13): 2-Nal
ERPRLSHKGPFPA

SEQ ID NO: 770 - protein, 13 aa, Artificial Sequence
  source: /note="Description of Artificial Sequence: Synthetic peptide"
  source: /note="N-term Palmitoyl"
  MOD_RES (4)..(4): hArg
  MOD_RES (5)..(5): NMeLeu
  MOD_RES (11)..(11): pI-Phe
  MOD_RES (13)..(13): D-Bip
LRPRLSHKGPFPF

SEQ ID NO: 771 - protein, 13 aa, Artificial Sequence
  source: /note="Description of Artificial Sequence: Synthetic peptide"
  MOD_RES (1)..(1): PyroGlu
  MOD_RES (4)..(4): hArg
  MOD_RES (5)..(5): Cha
  MOD_RES (11)..(11): Nle
  MOD_RES (12)..(12): 4-Cl-F
  MOD_RES (13)..(13): K(palmitoyl)
  source: /note="C-term Amide"
ERPRASHKGPLFK

SEQ ID NO: 772 - protein, 14 aa, Artificial Sequence
  source: /note="Description of Artificial Sequence: Synthetic peptide"
  MOD_RES (1)..(1): PyroGlu
  MOD_RES (4)..(4): hArg
  MOD_RES (5)..(5): NMeLeu
  MOD_RES (11)..(11): Nle
  MOD_RES (13)..(13): D-Bip
  MOD_RES (14)..(14): K(palmitoyl)
  source: /note="C-term Amide"
ERPRLSHKGPLPFK

SEQ ID NO: 773 - protein, 13 aa, Artificial Sequence
  source: /note="Description of Artificial Sequence: Synthetic peptide"
  MOD_RES (1)..(1): PyroGlu
  MOD_RES (4)..(4): hArg
  MOD_RES (5)..(5): Cha
  MOD_RES (11)..(11): Nle
  MOD_RES (12)..(12): D-1Nal
  MOD_RES (13)..(13): K(palmitoyl)
  source: /note="C-term Amide"
ERPRASHKGPLAK

SEQ ID NO: 774 - protein, 13 aa, Artificial Sequence
  source: /note="Description of Artificial Sequence: Synthetic peptide"
  MOD_RES (1)..(1): PyroGlu
  MOD_RES (4)..(4): hArg
  MOD_RES (5)..(5): NMeLeu
  MOD_RES (11)..(11): Nle
  MOD_RES (13)..(13): 2-Nal
  source: /note="C-term Amide"
ERPRLSHKGPLPA

SEQ ID NO: 775 - protein, 13 aa, Artificial Sequence
  source: /note="Description of Artificial Sequence: Synthetic peptide"
  MOD_RES (1)..(1): PyroGlu
  MOD_RES (4)..(4): hArg
  MOD_RES (5)..(5): NMeLeu
  MOD_RES (11)..(11): pI-Phe
  MOD_RES (13)..(13): 4-Cl-F
ERPRLSHKGPFPF

SEQ ID NO: 776 - protein, 13 aa, Artificial Sequence
  source: /note="Description of Artificial Sequence: Synthetic peptide"
  MOD_RES (1)..(1): PyroGlu
  MOD_RES (4)..(4): hArg
  MOD_RES (5)..(5): NMeLeu
  MOD_RES (11)..(11): Nle
  MOD_RES (13)..(13): 4-Cl-F
ERPRLSHKGPLPF

SEQ ID NO: 777 - protein, 13 aa, Artificial Sequence
  source: /note="Description of Artificial Sequence: Synthetic peptide"
  MOD_RES (1)..(1): PyroGlu
  MOD_RES (4)..(4): hArg
  MOD_RES (5)..(5): NMeLeu
  MOD_RES (11)..(11): Nle
  MOD_RES (13)..(13): 4-F-F
ERPRLSHKGPLPF

SEQ ID NO: 778 - protein, 13 aa, Artificial Sequence
  source: /note="Description of Artificial Sequence: Synthetic peptide"
  MOD_RES (1)..(1): PyroGlu
  MOD_RES (4)..(4): hArg
  MOD_RES (5)..(5): Cha
  MOD_RES (11)..(11): Nle
  MOD_RES (13)..(13): 4-F-F
ERPRASHKGPLPF

SEQ ID NO: 779 - protein, 13 aa, Artificial Sequence
  source: /note="Description of Artificial Sequence: Synthetic peptide"
  MOD_RES (1)..(1): PyroGlu
  MOD_RES (4)..(4): hArg
  MOD_RES (5)..(5): NMeLeu
  MOD_RES (11)..(11): Nle
  MOD_RES (13)..(13): pI-Phe
ERPRLSHKGPLPF

SEQ ID NO: 780 - protein, 13 aa, Artificial Sequence
  source: /note="Description of Artificial Sequence: Synthetic peptide"
  MOD_RES (1)..(1): PyroGlu
  MOD_RES (5)..(5): NMeLeu
  MOD_RES (12)..(12): 1-Nal
ERPRLFKKPPFAF

SEQ ID NO: 781 - protein, 13 aa, Artificial Sequence
  source: /note="Description of Artificial Sequence: Synthetic peptide"
  MOD_RES (1)..(1): PyroGlu
  MOD_RES (5)..(5): NMeLeu
  MOD_RES (11)..(11): Nle
ERPRLFHKGPLPF

SEQ ID NO: 782 - protein, 13 aa, Artificial Sequence
  source: /note="Description of Artificial Sequence: Synthetic peptide"
  MOD_RES (1)..(1): PyroGlu
  MOD_RES (4)..(4): hArg
  MOD_RES (5)..(5): NMeLeu
  MOD_RES (11)..(11): Nle
  MOD_RES (13)..(13): D-Phe
ERPRLSHKGPLPF

SEQ ID NO: 783 - protein, 13 aa, Artificial Sequence
  source: /note="Description of Artificial Sequence: Synthetic peptide"
  MOD_RES (1)..(1): PyroGlu
  MOD_RES (4)..(4): hArg
  MOD_RES (5)..(5): NMeLeu
  MOD_RES (11)..(11): Nle
ERPRLFHKPPLPF

SEQ ID NO: 784 - protein, 13 aa, Artificial Sequence
  source: /note="Description of Artificial Sequence: Synthetic peptide"
  source: /note="N-term Palmitoyl"
  MOD_RES (4)..(4): hArg
  MOD_RES (5)..(5): NMeLeu
  MOD_RES (11)..(11): pI-Phe
  MOD_RES (13)..(13): D-Bip
  source: /note="C-term Amide"
LRPRLSHKGPFPF

SEQ ID NO: 785 - protein, 14 aa, Artificial Sequence
  source: /note="Description of Artificial Sequence: Synthetic peptide"
  MOD_RES (1)..(1): PyroGlu
  MOD_RES (4)..(4): hArg
  MOD_RES (5)..(5): NMeLeu
  MOD_RES (11)..(11): Nle
  MOD_RES (13)..(13): D-Bip
  MOD_RES (14)..(14): K(palmitoyl)
  source: /note="C-term Amide"
ERPRLSHKGPLPFK

SEQ ID NO: 786 - protein, 13 aa, Artificial Sequence
  source: /note="Description of Artificial Sequence: Synthetic peptide"
  MOD_RES (1)..(1): PyroGlu
  MOD_RES (4)..(4): hArg
  MOD_RES (5)..(5): NMeLeu
  MOD_RES (11)..(11): Nle
ERPRLFHKPPLPF

SEQ ID NO: 787 - protein, 13 aa, Artificial Sequence
  source: /note="Description of Artificial Sequence: Synthetic peptide"
  MOD_RES (1)..(1): PyroGlu
  MOD_RES (5)..(5): NMeLeu
  MOD_RES (11)..(11): Nle
ERPRLFHKGPLPF

SEQ ID NO: 788 - protein, 13 aa, Artificial Sequence
  source: /note="Description of Artificial Sequence: Synthetic peptide"
  MOD_RES (1)..(1): PyroGlu
  MOD_RES (5)..(5): NMeLeu
  MOD_RES (11)..(11): Nle
ERPRLFHKGPLPF

SEQ ID NO: 789 - protein, 12 aa, Artificial Sequence
  source: /note="Description of Artificial Sequence: Synthetic peptide"
  MOD_RES (1)..(1): PyroGlu
  MOD_RES (4)..(4): hArg
  MOD_RES (5)..(5): Cha
  MOD_RES (11)..(11): Nle
  MOD_RES (12)..(12): 1-Nal
ERPRASHKGPLA

SEQ ID NO: 790 - protein, 13 aa, Artificial Sequence
  source: /note="Description of Artificial Sequence: Synthetic peptide"
  MOD_RES (1)..(1): PyroGlu
  MOD_RES (4)..(4): hArg
  MOD_RES (5)..(5): Cha
  MOD_RES (11)..(11): pI-Phe
  MOD_RES (13)..(13): 2-Nal
ERPRASHKGPFPA

SEQ ID NO: 791 - protein, 14 aa, Artificial Sequence
  source: /note="Description of Artificial Sequence: Synthetic peptide"
  source: /note="N-term Acetyl"
  MOD_RES (1)..(1): Pra
  MOD_RES (5)..(5): hArg
  MOD_RES (6)..(6): NMeLeu
  MOD_RES (7)..(7): Pra
  MOD_RES (9)..(9): Dpr
  MOD_RES (12)..(12): Nle
  MOD_RES (14)..(14): 4-Cl-F
GLRPRLGHXGPLPF

SEQ ID NO: 792 - protein, 14 aa, Artificial Sequence
  source: /note="Description of Artificial Sequence: Synthetic peptide"
  source: /note="N-term Acetyl"
  MOD_RES (1)..(1): Pra
  MOD_RES (5)..(5): hArg
  MOD_RES (6)..(6): NMeLeu
  MOD_RES (7)..(7): Pra
  MOD_RES (12)..(12): Nle
  MOD_RES (14)..(14): 4-Cl-F
GLRPRLGHHGPLPF

SEQ ID NO: 793 - protein, 14 aa, Artificial Sequence
  source: /note="Description of Artificial Sequence: Synthetic peptide"
  source: /note="N-term Acetyl"
  MOD_RES (1)..(1): Pra
  MOD_RES (5)..(5): hArg
  MOD_RES (6)..(6): NMeLeu
  MOD_RES (7)..(7): Pra
  MOD_RES (9)..(9): 2Pal
  MOD_RES (12)..(12): Nle
  MOD_RES (14)..(14): 4-Cl-F
GLRPRLGHAGPLPF

SEQ ID NO: 794 - protein, 14 aa, Artificial Sequence
  source: /note="Description of Artificial Sequence: Synthetic peptide"
  source: /note="N-term Acetyl"
  MOD_RES (1)..(1): Pra
  MOD_RES (5)..(5): hArg
  MOD_RES (6)..(6): NMeLeu
  MOD_RES (7)..(7): Pra
  MOD_RES (9)..(9): 3Pal
  MOD_RES (12)..(12): Nle
  MOD_RES (14)..(14): 4-Cl-F
GLRPRLGHAGPLPF

SEQ ID NO: 795 - protein, 14 aa, Artificial Sequence
  source: /note="Description of Artificial Sequence: Synthetic peptide"
  source: /note="N-term Acetyl"
  MOD_RES (1)..(1): Pra
  MOD_RES (5)..(5): hArg
  MOD_RES (6)..(6): NMeLeu
  MOD_RES (7)..(7): Pra
  MOD_RES (12)..(12): Nle
  MOD_RES (14)..(14): 4-Cl-F
GLRPRLGHRGPLPF

SEQ ID NO: 796 - protein, 14 aa, Artificial Sequence
  source: /note="Description of Artificial Sequence: Synthetic peptide"
  source: /note="N-term Acetyl"
  MOD_RES (1)..(1): Pra
  MOD_RES (5)..(5): hArg
  MOD_RES (6)..(6): NMeLeu
  MOD_RES (7)..(7): Pra
  MOD_RES (9)..(9): hArg
  MOD_RES (12)..(12): Nle
  MOD_RES (14)..(14): 4-Cl-F
GLRPRLGHRGPLPF

SEQ ID NO: 797 - protein, 14 aa, Artificial Sequence
  source: /note="Description of Artificial Sequence: Synthetic peptide"
  source: /note="N-term Acetyl"
  MOD_RES (1)..(1): Pra
  MOD_RES (5)..(5): hArg
  MOD_RES (6)..(6): NMeLeu
  MOD_RES (7)..(7): Pra
  MOD_RES (12)..(12): Nle
  MOD_RES (14)..(14): 4-Cl-F
GLRPRLGHKPPLPF

SEQ ID NO: 798 - protein, 14 aa, Artificial Sequence
  source: /note="Description of Artificial Sequence: Synthetic peptide"
  source: /note="N-term Acetyl"
  MOD_RES (1)..(1): Pra
  MOD_RES (5)..(5): hArg
  MOD_RES (6)..(6): NMeLeu
  MOD_RES (7)..(7): Pra
  MOD_RES (10)..(10): Oic
  MOD_RES (12)..(12): Nle
  MOD_RES (14)..(14): 4-Cl-F
GLRPRLGHKXPLPF

SEQ ID NO: 799 - protein, 14 aa, Artificial Sequence
  source: /note="Description of Artificial Sequence: Synthetic peptide"
  source: /note="N-term Acetyl"
  MOD_RES (1)..(1): Pra
  MOD_RES (5)..(5): hArg
  MOD_RES (6)..(6): NMeLeu
  MOD_RES (7)..(7): Pra
  MOD_RES (10)..(10): bAla
  MOD_RES (12)..(12): Nle
  MOD_RES (14)..(14): 4-Cl-F
GLRPRLGHKAPLPF

SEQ ID NO: 800 - protein, 14 aa, Artificial Sequence
  source: /note="Description of Artificial Sequence: Synthetic peptide"
  source: /note="N-term Acetyl"
  MOD_RES (1)..(1): Pra
  MOD_RES (5)..(5): hArg
  MOD_RES (6)..(6): NMeLeu
  MOD_RES (7)..(7): Pra
  MOD_RES (9)..(9): 1-Nal
  MOD_RES (12)..(12): Nle
  MOD_RES (14)..(14): 4-Cl-F
GLRPRLGHAPPLPF

SEQ ID NO: 801 - protein, 14 aa, Artificial Sequence
  source: /note="Description of Artificial Sequence: Synthetic peptide"
  source: /note="N-term Acetyl"
  MOD_RES (1)..(1): Pra
  MOD_RES (5)..(5): hArg
  MOD_RES (6)..(6): NMeLeu
  MOD_RES (7)..(7): Pra
  MOD_RES (12)..(12): Nle
  MOD_RES (14)..(14): 4-Cl-F
GLRPRLGHKGPLPF

SEQ ID NO: 802 - protein, 14 aa, Artificial Sequence
  source: /note="Description of Artificial Sequence: Synthetic peptide"
  source: /note="N-term Acetyl"
  MOD_RES (1)..(1): Pra
  MOD_RES (5)..(5): hArg
  MOD_RES (6)..(6): NMeLeu
  MOD_RES (7)..(7): Pra
  MOD_RES (9)..(9): 1-Nal
  MOD_RES (10)..(10): Oic
  MOD_RES (12)..(12): Nle
  MOD_RES (14)..(14): 4-Cl-F
GLRPRLGHAXPLPF

SEQ ID NO: 803 - protein, 14 aa, Artificial Sequence
  source: /note="Description of Artificial Sequence: Synthetic peptide"
  source: /note="N-term Acetyl"
  MOD_RES (1)..(1): Pra
  MOD_RES (5)..(5): hArg
  MOD_RES (6)..(6): NMeLeu
  MOD_RES (7)..(7): Pra
  MOD_RES (9)..(9): 1-Nal
  MOD_RES (10)..(10): bAla
  MOD_RES (12)..(12): Nle
  MOD_RES (14)..(14): 4-Cl-F
GLRPRLGHAAPLPF

SEQ ID NO: 804 - protein, 14 aa, Artificial Sequence
  source: /note="Description of Artificial Sequence: Synthetic peptide"
  source: /note="N-term Acetyl"
  MOD_RES (1)..(1): Pra
  MOD_RES (5)..(5): hArg
  MOD_RES (6)..(6): NMeLeu
  MOD_RES (7)..(7): Pra
  MOD_RES (12)..(12): Nle
  MOD_RES (14)..(14): 4-Cl-F
GLRPRLGHKPPLPF

SEQ ID NO: 805 - protein, 14 aa, Artificial Sequence
  source: /note="Description of Artificial Sequence: Synthetic peptide"
  source: /note="N-term Acetyl"
  MOD_RES (1)..(1): Pra
  MOD_RES (5)..(5): hArg
  MOD_RES (6)..(6): NMeLeu
  MOD_RES (7)..(7): Pra
  MOD_RES (9)..(9): 2Nal
  MOD_RES (12)..(12): Nle
  MOD_RES (14)..(14): 4-Cl-F
GLRPRLGHAPPLPF

SEQ ID NO: 806 - protein, 14 aa, Artificial Sequence
  source: /note="Description of Artificial Sequence: Synthetic peptide"
  source: /note="N-term Acetyl"
  MOD_RES (1)..(1): Pra
  MOD_RES (5)..(5): hArg
  MOD_RES (6)..(6): NMeLeu
  MOD_RES (7)..(7): Pra
  MOD_RES (9)..(9): Bip
  MOD_RES (12)..(12): Nle
  MOD_RES (14)..(14): 4-Cl-F
GLRPRLGHFPPLPF

SEQ ID NO: 807 - protein, 14 aa, Artificial Sequence
  source: /note="Description of Artificial Sequence: Synthetic peptide"
  source: /note="N-term Acetyl"
  MOD_RES (1)..(1): Pra
  MOD_RES (5)..(5): hArg
  MOD_RES (6)..(6): NMeLeu
  MOD_RES (7)..(7): Pra
  MOD_RES (12)..(12): Nle
  MOD_RES (14)..(14): 4-Cl-F
GLRPRLGHFPPLPF

SEQ ID NO: 808 - protein, 14 aa, Artificial Sequence
  source: /note="Description of Artificial Sequence: Synthetic peptide"
  source: /note="N-term Acetyl"
  MOD_RES (1)..(1): Pra
  MOD_RES (5)..(5): hArg
  MOD_RES (6)..(6): NMeLeu
  MOD_RES (7)..(7): Pra
  MOD_RES (9)..(9): 4AmP
  MOD_RES (12)..(12): Nle
  MOD_RES (14)..(14): 4-Cl-F
GLRPRLGHFPPLPF

SEQ ID NO: 809 - protein, 14 aa, Artificial Sequence
  source: /note="Description of Artificial Sequence: Synthetic peptide"
  source: /note="N-term Acetyl"
  MOD_RES (1)..(1): Pra
  MOD_RES (5)..(5): hArg
  MOD_RES (6)..(6): NMeLeu
  MOD_RES (7)..(7): Pra
  MOD_RES (9)..(9): Orn
  MOD_RES (12)..(12): Nle
  MOD_RES (14)..(14): 4-Cl-F
GLRPRLGHXPPLPF

SEQ ID NO: 810 - protein, 14 aa, Artificial Sequence
  source: /note="Description of Artificial Sequence: Synthetic peptide"
  source: /note="N-term Acetyl"
  MOD_RES (1)..(1): Pra
  MOD_RES (5)..(5): hArg
  MOD_RES (6)..(6): NMeLeu
  MOD_RES (7)..(7): Pra
  MOD_RES (9)..(9): Dab
  MOD_RES (12)..(12): Nle
  MOD_RES (14)..(14): 4-Cl-F
GLRPRLGHXPPLPF

SEQ ID NO: 811 - protein, 14 aa, Artificial Sequence
  source: /note="Description of Artificial Sequence: Synthetic peptide"
  source: /note="N-term Acetyl"
  MOD_RES (1)..(1): Pra
  MOD_RES (5)..(5): hArg
  MOD_RES (6)..(6): NMeLeu
  MOD_RES (7)..(7): Pra
  MOD_RES (9)..(9): Dpr
  MOD_RES (12)..(12): Nle
  MOD_RES (14)..(14): 4-Cl-F
GLRPRLGHXPPLPF

SEQ ID NO: 812 - protein, 14 aa, Artificial Sequence
  source: /note="Description of Artificial Sequence: Synthetic peptide"
  source: /note="N-term Acetyl"
  MOD_RES (1)..(1): Pra
  MOD_RES (5)..(5): hArg
  MOD_RES (6)..(6): NMeLeu
  MOD_RES (7)..(7): Pra
  MOD_RES (9)..(9): 1-Nal
  MOD_RES (12)..(12): Nle
  MOD_RES (14)..(14): 4-Cl-F
GLRPRLGHAGPLPF

SEQ ID NO: 813 - protein, 14 aa, Artificial Sequence
  source: /note="Description of Artificial Sequence: Synthetic peptide"
  source: /note="N-term Acetyl"
  MOD_RES (1)..(1): Pra
  MOD_RES (5)..(5): hArg
  MOD_RES (6)..(6): NMeLeu
  MOD_RES (7)..(7): Pra
  MOD_RES (12)..(12): Nle
  MOD_RES (14)..(14): 4-Cl-F
GLRPRLGHHPPLPF

SEQ ID NO: 814 - protein, 14 aa, Artificial Sequence
  source: /note="Description of Artificial Sequence: Synthetic peptide"
  source: /note="N-term Acetyl"
  MOD_RES (1)..(1): Pra
  MOD_RES (5)..(5): hArg
  MOD_RES (6)..(6): NMeLeu
  MOD_RES (7)..(7): Pra
  MOD_RES (9)..(9): 2Pal
  MOD_RES (12)..(12): Nle
  MOD_RES (14)..(14): 4-Cl-F
GLRPRLGHAPPLPF

SEQ ID NO: 815 - protein, 14 aa, Artificial Sequence
  source: /note="Description of Artificial Sequence: Synthetic peptide"
  source: /note="N-term Acetyl"
  MOD_RES (1)..(1): Pra
  MOD_RES (5)..(5): hArg
  MOD_RES (6)..(6): NMeLeu
  MOD_RES (7)..(7): Pra
  MOD_RES (9)..(9): 3Pal
  MOD_RES (12)..(12): Nle
  MOD_RES (14)..(14): 4-Cl-F
GLRPRLGHAPPLPF

SEQ ID NO: 816 - protein, 14 aa, Artificial Sequence
  source: /note="Description of Artificial Sequence: Synthetic peptide"
  source: /note="N-term Acetyl"
  MOD_RES (1)..(1): Pra
  MOD_RES (5)..(5): hArg
  MOD_RES (6)..(6): NMeLeu
  MOD_RES (7)..(7): Pra
  MOD_RES (12)..(12): Nle
  MOD_RES (14)..(14): 4-Cl-F
GLRPRLGHRPPLPF

SEQ ID NO: 817 - protein, 14 aa, Artificial Sequence
  source: /note="Description of Artificial Sequence: Synthetic peptide"
  source: /note="N-term Acetyl"
  MOD_RES (1)..(1): Pra
  MOD_RES (5)..(5): hArg
  MOD_RES (6)..(6): NMeLeu
  MOD_RES (7)..(7): Pra
  MOD_RES (9)..(9): hArg
  MOD_RES (12)..(12): Nle
  MOD_RES (14)..(14): 4-Cl-F
GLRPRLGHRPPLPF

SEQ ID NO: 818 - protein, 14 aa, Artificial Sequence
  source: /note="Description of Artificial Sequence: Synthetic peptide"
  source: /note="N-term Acetyl"
  MOD_RES (1)..(1): Pra
  MOD_RES (5)..(5): hArg
  MOD_RES (6)..(6): NMeLeu
  MOD_RES (7)..(7): Pra
  MOD_RES (12)..(12): Nle
  MOD_RES (14)..(14): 4-Cl-F
GLRPRLGHKGPLPF

SEQ ID NO: 819 - protein, 14 aa, Artificial Sequence
  source: /note="Description of Artificial Sequence: Synthetic peptide"
  source: /note="N-term Acetyl"
  MOD_RES (1)..(1): Pra
  MOD_RES (5)..(5): hArg
  MOD_RES (6)..(6): NMeLeu
  MOD_RES (7)..(7): Pra
  MOD_RES (11)..(11): Oic
  MOD_RES (12)..(12): Nle
  MOD_RES (14)..(14): 4-Cl-F
GLRPRLGHKGXLPF

SEQ ID NO: 820 - protein, 14 aa, Artificial Sequence
  source: /note="Description of Artificial Sequence: Synthetic peptide"
  source: /note="N-term Acetyl"
  MOD_RES (1)..(1): Pra
  MOD_RES (5)..(5): hArg
  MOD_RES (6)..(6): NMeLeu
  MOD_RES (7)..(7): Pra
  MOD_RES (12)..(12): Nle
  MOD_RES (13)..(13): Oic
  MOD_RES (14)..(14): 4-Cl-F
GLRPRLGHKGPLXF

SEQ ID NO: 821 - protein, 14 aa, Artificial Sequence
  source: /note="Description of Artificial Sequence: Synthetic peptide"
  source: /note="N-term Acetyl"
  MOD_RES (1)..(1): Pra
  MOD_RES (4)..(4): Oic
  MOD_RES (5)..(5): hArg
  MOD_RES (6)..(6): NMeLeu
  MOD_RES (7)..(7): Pra
  MOD_RES (12)..(12): Nle
  MOD_RES (14)..(14): 4-Cl-F
GLRXRLGHKGPLPF

SEQ ID NO: 822 - protein, 14 aa, Artificial Sequence
  source: /note="Description of Artificial Sequence: Synthetic peptide"
  source: /note="N-term Acetyl"
  MOD_RES (1)..(1): Pra
  MOD_RES (4)..(4): Oic
  MOD_RES (5)..(5): hArg
  MOD_RES (6)..(6): NMeLeu
  MOD_RES (7)..(7): Pra
  MOD_RES (11)..(11): Oic
  MOD_RES (12)..(12): Nle
  MOD_RES (13)..(13): Oic
  MOD_RES (14)..(14): 4-Cl-F
GLRXRLGHKGXLXF

SEQ ID NO: 823 - protein, 14 aa, Artificial Sequence
  source: /note="Description of Artificial Sequence: Synthetic peptide"
  source: /note="N-term Acetyl"
  MOD_RES (1)..(1): Pra
  MOD_RES (5)..(5): hArg
  MOD_RES (6)..(6): NMeLeu
  MOD_RES (7)..(7): Pra
  MOD_RES (9)..(9): 2Nal
  MOD_RES (12)..(12): Nle
  MOD_RES (14)..(14): 4-Cl-F
GLRPRLGHAGPLPF

SEQ ID NO: 824 - protein, 14 aa, Artificial Sequence
  source: /note="Description of Artificial Sequence: Synthetic peptide"
  source: /note="N-term Acetyl"
  MOD_RES (1)..(1): Pra
  MOD_RES (4)..(4): Oic
  MOD_RES (5)..(5): hArg
  MOD_RES (6)..(6): NMeLeu
  MOD_RES (7)..(7): Pra
  MOD_RES (12)..(12): Nle
  MOD_RES (13)..(13): Oic
  MOD_RES (14)..(14): 4-Cl-F
GLRXRLGHKGPLXF

SEQ ID NO: 825 - protein, 14 aa, Artificial Sequence
  source: /note="Description of Artificial Sequence: Synthetic peptide"
  source: /note="N-term Acetyl"
  MOD_RES (1)..(1): Pra
  MOD_RES (4)..(4): Oic
  MOD_RES (5)..(5): hArg
  MOD_RES (6)..(6): NMeLeu
  MOD_RES (7)..(7): Pra
  MOD_RES (11)..(11): Oic
  MOD_RES (12)..(12): Nle
  MOD_RES (14)..(14): 4-Cl-F
GLRXRLGHKGXLPF

SEQ ID NO: 826 - protein, 14 aa, Artificial Sequence
  source: /note="Description of Artificial Sequence: Synthetic peptide"
  source: /note="N-term Acetyl"
  MOD_RES (1)..(1): Pra
  MOD_RES (5)..(5): hArg
  MOD_RES (6)..(6): NMeLeu
  MOD_RES (7)..(7): Pra
  MOD_RES (11)..(11): Oic
  MOD_RES (12)..(12): Nle
  MOD_RES (13)..(13): Oic
  MOD_RES (14)..(14): 4-Cl-F
GLRPRLGHKGXLXF

SEQ ID NO: 827 - protein, 14 aa, Artificial Sequence
  source: /note="Description of Artificial Sequence: Synthetic peptide"
  source: /note="N-term Acetyl"
  MOD_RES (1)..(1): Pra
  MOD_RES (5)..(5): NMeArg
  MOD_RES (6)..(6): NMeLeu
  MOD_RES (7)..(7): Pra
  MOD_RES (12)..(12): Nle
  MOD_RES (14)..(14): 4-Cl-F
GLRPRLGHKGPLPF

SEQ ID NO: 828 - protein, 14 aa, Artificial Sequence
  source: /note="Description of Artificial Sequence: Synthetic peptide"
  source: /note="N-term Acetyl"
  MOD_RES (1)..(1): Pra
  MOD_RES (3)..(3): NMeArg
  MOD_RES (5)..(5): hArg
  MOD_RES (6)..(6): NMeLeu
  MOD_RES (7)..(7): Pra
  MOD_RES (12)..(12): Nle
  MOD_RES (14)..(14): 4-Cl-F
GLRPRLGHKGPLPF

SEQ ID NO: 829 - protein, 14 aa, Artificial Sequence
  source: /note="Description of Artificial Sequence: Synthetic peptide"
  source: /note="N-term Acetyl"
  MOD_RES (1)..(1): Pra
  MOD_RES (3)..(3): NMeArg
  MOD_RES (5)..(5): NMeArg
  MOD_RES (6)..(6): NMeLeu
  MOD_RES (7)..(7): Pra
  MOD_RES (12)..(12): Nle
  MOD_RES (14)..(14): 4-Cl-F
GLRPRLGHKGPLPF

SEQ ID NO: 830 - protein, 14 aa, Artificial Sequence
  source: /note="Description of Artificial Sequence: Synthetic peptide"
  source: /note="N-term Acetyl"
  MOD_RES (1)..(1): Pra
  MOD_RES (5)..(5): hArg
  MOD_RES (6)..(6): NMeLeu
  MOD_RES (7)..(7): Pra
  MOD_RES (11)..(11): Oic
  MOD_RES (12)..(12): Nle
  MOD_RES (13)..(13): Tic
  MOD_RES (14)..(14): 4-Cl-F
GLRPRLGHKGXLXF

SEQ ID NO: 831 - protein, 14 aa, Artificial Sequence
  source: /note="Description of Artificial Sequence: Synthetic peptide"
  source: /note="N-term Acetyl"
  MOD_RES (1)..(1): Pra
  MOD_RES (4)..(4): Tic
  MOD_RES (5)..(5): hArg
  MOD_RES (6)..(6): NMeLeu
  MOD_RES (7)..(7): Pra
  MOD_RES (11)..(11): Oic
  MOD_RES (12)..(12): Nle
  MOD_RES (14)..(14): 4-Cl-F
GLRXRLGHKGXLPF

SEQ ID NO: 832 - protein, 13 aa, Artificial Sequence
  source: /note="Description of Artificial Sequence: Synthetic peptide"
  MOD_RES (1)..(1): PyroGlu
  MOD_RES (4)..(4): hArg
  MOD_RES (5)..(5): NMeLeu
  MOD_RES (6)..(6): Pra
  MOD_RES (10)..(10): Oic
  MOD_RES (11)..(11): Nle
  MOD_RES (13)..(13): 4-Cl-F
ERPRLGHKGXLPF

SEQ ID NO: 833 - protein, 13 aa, Artificial Sequence
  source: /note="Description of Artificial Sequence: Synthetic peptide"
  MOD_RES (1)..(1): PyroGlu
  MOD_RES (4)..(4): hArg
  MOD_RES (5)..(5): NMeLeu
  MOD_RES (6)..(6): Pra
  MOD_RES (8)..(8): 1-Nal
  MOD_RES (10)..(10): Oic
  MOD_RES (11)..(11): Nle
  MOD_RES (13)..(13): 4-Cl-F
ERPRLGHAGXLPF

SEQ ID NO: 834 - protein, 14 aa, Artificial Sequence
  source: /note="Description of Artificial Sequence: Synthetic peptide"
  source: /note="N-term Acetyl"
  MOD_RES (1)..(1): Pra
  MOD_RES (5)..(5): hArg
  MOD_RES (6)..(6): NMeLeu
  MOD_RES (7)..(7): Pra
  MOD_RES (9)..(9): Bip
  MOD_RES (12)..(12): Nle
  MOD_RES (14)..(14): 4-Cl-F
GLRPRLGHFGPLPF

SEQ ID NO: 835 - protein, 13 aa, Artificial Sequence
  source: /note="Description of Artificial Sequence: Synthetic peptide"
  MOD_RES (1)..(1): PyroGlu
  MOD_RES (4)..(4): hArg
  MOD_RES (5)..(5): NMeLeu
  MOD_RES (6)..(6): Pra
  MOD_RES (8)..(8): 2Nal
  MOD_RES (10)..(10): Oic
  MOD_RES (11)..(11): Nle
  MOD_RES (13)..(13): 4-Cl-F
ERPRLGHAGXLPF

SEQ ID NO: 836 - protein, 13 aa, Artificial Sequence
  source: /note="Description of Artificial Sequence: Synthetic peptide"
  MOD_RES (1)..(1): PyroGlu
  MOD_RES (4)..(4): hArg
  MOD_RES (5)..(5): NMeLeu
  MOD_RES (6)..(6): Pra
  MOD_RES (8)..(8): Bip
  MOD_RES (10)..(10): Oic
  MOD_RES (11)..(11): Nle
  MOD_RES (13)..(13): 4-Cl-F
ERPRLGHFGXLPF

SEQ ID NO: 837 - protein, 13 aa, Artificial Sequence
  source: /note="Description of Artificial Sequence: Synthetic peptide"
  MOD_RES (1)..(1): PyroGlu
  MOD_RES (4)..(4): hArg
  MOD_RES (5)..(5): NMeLeu
  MOD_RES (6)..(6): Pra
  MOD_RES (10)..(10): Oic
  MOD_RES (11)..(11): Nle
  MOD_RES (13)..(13): 4-Cl-F
ERPRLGHFGXLPF

SEQ ID NO: 838 - protein, 13 aa, Artificial Sequence
  source: /note="Description of Artificial Sequence: Synthetic peptide"
  MOD_RES (1)..(1): PyroGlu
  MOD_RES (4)..(4): hArg
  MOD_RES (5)..(5): NMeLeu
  MOD_RES (6)..(6): Pra
  MOD_RES (8)..(8): 4AmP
  MOD_RES (10)..(10): Oic
  MOD_RES (11)..(11): Nle
  MOD_RES (13)..(13): 4-Cl-F
ERPRLGHFGXLPF

SEQ ID NO: 839 - protein, 13 aa, Artificial Sequence
  source: /note="Description of Artificial Sequence: Synthetic peptide"
  MOD_RES (1)..(1): PyroGlu
  MOD_RES (4)..(4): hArg
  MOD_RES (5)..(5): NMeLeu
  MOD_RES (6)..(6): Pra
  MOD_RES (8)..(8): Orn
  MOD_RES (10)..(10): Oic
  MOD_RES (11)..(11): Nle
  MOD_RES (13)..(13): 4-Cl-F
ERPRLGHXGXLPF

SEQ ID NO: 840 - protein, 13 aa, Artificial Sequence
  source: /note="Description of Artificial Sequence: Synthetic peptide"
  MOD_RES (1)..(1): PyroGlu
  MOD_RES (4)..(4): hArg
  MOD_RES (5)..(5): NMeLeu
  MOD_RES (6)..(6): Pra
  MOD_RES (8)..(8): Dab
  MOD_RES (10)..(10): Oic
  MOD_RES (11)..(11): Nle
  MOD_RES (13)..(13): 4-Cl-F
ERPRLGHXGXLPF

SEQ ID NO: 841 - protein, 13 aa, Artificial Sequence
  source: /note="Description of Artificial Sequence: Synthetic peptide"
  MOD_RES (1)..(1): PyroGlu
  MOD_RES (4)..(4): hArg
  MOD_RES (5)..(5): NMeLeu
  MOD_RES (6)..(6): Pra
  MOD_RES (8)..(8): Dpr
  MOD_RES (10)..(10): Oic
  MOD_RES (11)..(11): Nle
  MOD_RES (13)..(13): 4-Cl-F
ERPRLGHXGXLPF

SEQ ID NO: 842 - protein, 13 aa, Artificial Sequence
  source: /note="Description of Artificial Sequence: Synthetic peptide"
  MOD_RES (1)..(1): PyroGlu
  MOD_RES (4)..(4): hArg
  MOD_RES (5)..(5): NMeLeu
  MOD_RES (6)..(6): Pra
  MOD_RES (10)..(10): Oic
  MOD_RES (11)..(11): Nle
  MOD_RES (13)..(13): 4-Cl-F
ERPRLGHHGXLPF

SEQ ID NO: 843 - protein, 13 aa, Artificial Sequence
  source: /note="Description of Artificial Sequence: Synthetic peptide"
  MOD_RES (1)..(1): PyroGlu
  MOD_RES (4)..(4): hArg
  MOD_RES (5)..(5): NMeLeu
  MOD_RES (6)..(6): Pra
  MOD_RES (8)..(8): 2Pal
  MOD_RES (10)..(10): Oic
  MOD_RES (11)..(11): Nle
  MOD_RES (13)..(13): 4-Cl-F
ERPRLGHAGXLPF

SEQ ID NO: 844 - protein, 13 aa, Artificial Sequence
  source: /note="Description of Artificial Sequence: Synthetic peptide"
  MOD_RES (1)..(1): PyroGlu
  MOD_RES (4)..(4): hArg
  MOD_RES (5)..(5): NMeLeu
  MOD_RES (6)..(6): Pra
  MOD_RES (8)..(8): 3Pal
  MOD_RES (10)..(10): Oic
  MOD_RES (11)..(11): Nle
  MOD_RES (13)..(13): 4-Cl-F
ERPRLGHAGXLPF

SEQ ID NO: 845 - protein, 14 aa, Artificial Sequence
  source: /note="Description of Artificial Sequence: Synthetic peptide"
  source: /note="N-term Acetyl"
  MOD_RES (1)..(1): Pra
  MOD_RES (5)..(5): hArg
  MOD_RES (6)..(6): NMeLeu
  MOD_RES (7)..(7): Pra
  MOD_RES (12)..(12): Nle
  MOD_RES (14)..(14): 4-Cl-F
GLRPRLGHFGPLPF

SEQ ID NO: 846 - protein, 13 aa, Artificial Sequence
  source: /note="Description of Artificial Sequence: Synthetic peptide"
  MOD_RES (1)..(1): PyroGlu
  MOD_RES (4)..(4): hArg
  MOD_RES (5)..(5): NMeLeu
  MOD_RES (6)..(6): Pra
  MOD_RES (10)..(10): Oic
  MOD_RES (11)..(11): Nle
  MOD_RES (13)..(13): 4-Cl-F
ERPRLGHRGXLPF

SEQ ID NO: 847 - protein, 13 aa, Artificial Sequence
  source: /note="Description of Artificial Sequence: Synthetic peptide"
  MOD_RES (1)..(1): PyroGlu
  MOD_RES (4)..(4): hArg
  MOD_RES (5)..(5): NMeLeu
  MOD_RES (6)..(6): Pra
  MOD_RES (8)..(8): hArg
  MOD_RES (10)..(10): Oic
  MOD_RES (11)..(11): Nle
  MOD_RES (13)..(13): 4-Cl-F
ERPRLGHRGXLPF

SEQ ID NO: 848 - protein, 13 aa, Artificial Sequence
  source: /note="Description of Artificial Sequence: Synthetic peptide"
  MOD_RES (1)..(1): PyroGlu
  MOD_RES (4)..(4): hArg
  MOD_RES (5)..(5): NMeLeu
  MOD_RES (6)..(6): Pra
  MOD_RES (10)..(10): Oic
  MOD_RES (11)..(11): Nle
  MOD_RES (13)..(13): 4-Cl-F
ERPRLGHKPXLPF

SEQ ID NO: 849 - protein, 13 aa, Artificial Sequence
  source: /note="Description of Artificial Sequence: Synthetic peptide"
  MOD_RES (1)..(1): PyroGlu
  MOD_RES (4)..(4): hArg
  MOD_RES (5)..(5): NMeLeu
  MOD_RES (6)..(6): Pra
  MOD_RES (9)..(10): Oic
  MOD_RES (11)..(11): Nle
  MOD_RES (13)..(13): 4-Cl-F
ERPRLGHKXXLPF

SEQ ID NO: 850 - protein, 13 aa, Artificial Sequence
  source: /note="Description of Artificial Sequence: Synthetic peptide"
  MOD_RES (1)..(1): PyroGlu
  MOD_RES (4)..(4): hArg
  MOD_RES (5)..(5): NMeLeu
  MOD_RES (6)..(6): Pra
  MOD_RES (9)..(9): bAla
  MOD_RES (10)..(10): Oic
  MOD_RES (11)..(11): Nle
  MOD_RES (13)..(13): 4-Cl-F
ERPRLGHKAXLPF

SEQ ID NO: 851 - protein, 13 aa, Artificial Sequence
  source: /note="Description of Artificial Sequence: Synthetic peptide"
  MOD_RES (1)..(1): PyroGlu
  MOD_RES (4)..(4): hArg
  MOD_RES (5)..(5): NMeLeu
  MOD_RES (6)..(6): Pra
  MOD_RES (8)..(8): 1-Nal
  MOD_RES (10)..(10): Oic
  MOD_RES (11)..(11): Nle
  MOD_RES (13)..(13): 4-Cl-F
ERPRLGHAPXLPF

SEQ ID NO: 852 - protein, 13 aa, Artificial Sequence
  source: /note="Description of Artificial Sequence: Synthetic peptide"
  MOD_RES (1)..(1): PyroGlu
  MOD_RES (4)..(4): hArg
  MOD_RES (5)..(5): NMeLeu
  MOD_RES (6)..(6): Pra
  MOD_RES (8)..(8): 1-Nal
  MOD_RES (9)..(10): Oic
  MOD_RES (11)..(11): Nle
  MOD_RES (13)..(13): 4-Cl-F
ERPRLGHAXXLPF

SEQ ID NO: 853 - protein, 13 aa, Artificial Sequence
  source: /note="Description of Artificial Sequence: Synthetic peptide"
  MOD_RES (1)..(1): PyroGlu
  MOD_RES (4)..(4): hArg
  MOD_RES (5)..(5): NMeLeu
  MOD_RES (6)..(6): Pra
  MOD_RES (8)..(8): 1-Nal
  MOD_RES (9)..(9): bAla
  MOD_RES (10)..(10): Oic
  MOD_RES (11)..(11): Nle
  MOD_RES (13)..(13): 4-Cl-F
ERPRLGHAAXLPF

SEQ ID NO: 854 - protein, 13 aa, Artificial Sequence
  source: /note="Description of Artificial Sequence: Synthetic peptide"
  MOD_RES (1)..(1): PyroGlu
  MOD_RES (4)..(4): hArg
  MOD_RES (5)..(5): NMeLeu
  MOD_RES (6)..(6): Pra
  MOD_RES (10)..(10): Oic
  MOD_RES (11)..(11): Nle
  MOD_RES (13)..(13): 4-Cl-F
ERPRLGHKPXLPF

SEQ ID NO: 855 - protein, 13 aa, Artificial Sequence
  source: /note="Description of Artificial Sequence: Synthetic peptide"
  MOD_RES (1)..(1): PyroGlu
  MOD_RES (4)..(4): hArg
  MOD_RES (5)..(5): NMeLeu
  MOD_RES (6)..(6): Pra
  MOD_RES (8)..(8): 2Nal
  MOD_RES (10)..(10): Oic
  MOD_RES (11)..(11): Nle
  MOD_RES (13)..(13): 4-Cl-F
ERPRLGHAPXLPF

SEQ ID NO: 856 - protein, 14 aa, Artificial Sequence
  source: /note="Description of Artificial Sequence: Synthetic peptide"
  source: /note="N-term Acetyl"
  MOD_RES (1)..(1): Pra
  MOD_RES (5)..(5): hArg
  MOD_RES (6)..(6): NMeLeu
  MOD_RES (7)..(7): Pra
  MOD_RES (9)..(9): 4AmP
  MOD_RES (12)..(12): Nle
  MOD_RES (14)..(14): 4-Cl-F
GLRPRLGHFGPLPF

SEQ ID NO: 857 - protein, 13 aa, Artificial Sequence
  source: /note="Description of Artificial Sequence: Synthetic peptide"
  MOD_RES (1)..(1): PyroGlu
  MOD_RES (4)..(4): hArg
  MOD_RES (5)..(5): NMeLeu
  MOD_RES (6)..(6): Pra
  MOD_RES (8)..(8): Bip
  MOD_RES (10)..(10): Oic
  MOD_RES (11)..(11): Nle
  MOD_RES (13)..(13): 4-Cl-F
ERPRLGHFPXLPF

SEQ ID NO: 858 - protein, 13 aa, Artificial Sequence
  source: /note="Description of Artificial Sequence: Synthetic peptide"
  MOD_RES (1)..(1): PyroGlu
  MOD_RES (4)..(4): hArg
  MOD_RES (5)..(5): NMeLeu
  MOD_RES (6)..(6): Pra
  MOD_RES (10)..(10): Oic
  MOD_RES (11)..(11): Nle
  MOD_RES (13)..(13): 4-Cl-F
ERPRLGHFPXLPF

SEQ ID NO: 859 - protein, 13 aa, Artificial Sequence
  source: /note="Description of Artificial Sequence: Synthetic peptide"
  MOD_RES (1)..(1): PyroGlu
  MOD_RES (4)..(4): hArg
  MOD_RES (5)..(5): NMeLeu
  MOD_RES (6)..(6): Pra
  MOD_RES (8)..(8): 4AmP
  MOD_RES (10)..(10): Oic
  MOD_RES (11)..(11): Nle
  MOD_RES (13)..(13): 4-Cl-F
ERPRLGHFPXLPF

SEQ ID NO: 860 - protein, 13 aa, Artificial Sequence
  source: /note="Description of Artificial Sequence: Synthetic peptide"
  MOD_RES (1)..(1): PyroGlu
  MOD_RES (4)..(4): hArg
  MOD_RES (5)..(5): NMeLeu
  MOD_RES (6)..(6): Pra
  MOD_RES (8)..(8): Orn
  MOD_RES (10)..(10): Oic
  MOD_RES (11)..(11): Nle
  MOD_RES (13)..(13): 4-Cl-F
ERPRLGHXPXLPF

SEQ ID NO: 861 - protein, 13 aa, Artificial Sequence
  source: /note="Description of Artificial Sequence: Synthetic peptide"
  MOD_RES (1)..(1): PyroGlu
  MOD_RES (4)..(4): hArg
  MOD_RES (5)..(5): NMeLeu
  MOD_RES (6)..(6): Pra
  MOD_RES (8)..(8): Dab
  MOD_RES (10)..(10): Oic
  MOD_RES (11)..(11): Nle
  MOD_RES (13)..(13): 4-Cl-F
ERPRLGHXPXLPF

SEQ ID NO: 862 - protein, 13 aa, Artificial Sequence
  source: /note="Description of Artificial Sequence: Synthetic peptide"
  MOD_RES (1)..(1): PyroGlu
  MOD_RES (4)..(4): hArg
  MOD_RES (5)..(5): NMeLeu
  MOD_RES (6)..(6): Pra
  MOD_RES (8)..(8): Dpr
  MOD_RES (10)..(10): Oic
  MOD_RES (11)..(11): Nle
  MOD_RES (13)..(13): 4-Cl-F
ERPRLGHXPXLPF

SEQ ID NO: 863 - protein, 13 aa, Artificial Sequence
  source: /note="Description of Artificial Sequence: Synthetic peptide"
  MOD_RES (1)..(1): PyroGlu
  MOD_RES (4)..(4): hArg
  MOD_RES (5)..(5): NMeLeu
  MOD_RES (6)..(6): Pra
  MOD_RES (10)..(10): Oic
  MOD_RES (11)..(11): Nle
  MOD_RES (13)..(13): 4-Cl-F
ERPRLGHHPXLPF

SEQ ID NO: 864 - protein, 13 aa, Artificial Sequence
  source: /note="Description of Artificial Sequence: Synthetic peptide"
  MOD_RES (1)..(1): PyroGlu
  MOD_RES (4)..(4): hArg
  MOD_RES (5)..(5): NMeLeu
  MOD_RES (6)..(6): Pra
  MOD_RES (8)..(8): 2Pal
  MOD_RES (10)..(10): Oic
  MOD_RES (11)..(11): Nle
  MOD_RES (13)..(13): 4-Cl-F
ERPRLGHAPXLPF

SEQ ID NO: 865 - protein, 13 aa, Artificial Sequence
  source: /note="Description of Artificial Sequence: Synthetic peptide"
  MOD_RES (1)..(1): PyroGlu
  MOD_RES (4)..(4): hArg
  MOD_RES (5)..(5): NMeLeu
  MOD_RES (6)..(6): Pra
  MOD_RES (8)..(8): 3Pal
  MOD_RES (10)..(10): Oic
  MOD_RES (11)..(11): Nle
  MOD_RES (13)..(13): 4-Cl-F
ERPRLGHAPXLPF

SEQ ID NO: 866 - protein, 13 aa, Artificial Sequence
  source: /note="Description of Artificial Sequence: Synthetic peptide"
  MOD_RES (1)..(1): PyroGlu
  MOD_RES (4)..(4): hArg
  MOD_RES (5)..(5): NMeLeu
  MOD_RES (6)..(6): Pra
  MOD_RES (10)..(10): Oic
  MOD_RES (11)..(11): Nle
  MOD_RES (13)..(13): 4-Cl-F
ERPRLGHRPXLPF

SEQ ID NO: 867 - protein, 14 aa, Artificial Sequence
  source: /note="Description of Artificial Sequence: Synthetic peptide"
  source: /note="N-term Acetyl"
  MOD_RES (1)..(1): Pra
  MOD_RES (5)..(5): hArg
  MOD_RES (6)..(6): NMeLeu
  MOD_RES (7)..(7): Pra
  MOD_RES (9)..(9): Orn
  MOD_RES (12)..(12): Nle
  MOD_RES (14)..(14): 4-Cl-F
GLRPRLGHXGPLPF

SEQ ID NO: 868 - protein, 13 aa, Artificial Sequence
  source: /note="Description of Artificial Sequence: Synthetic peptide"
  MOD_RES (1)..(1): PyroGlu
  MOD_RES (4)..(4): hArg
  MOD_RES (5)..(5): NMeLeu
  MOD_RES (6)..(6): Pra
  MOD_RES (8)..(8): hArg
  MOD_RES (10)..(10): Oic
  MOD_RES (11)..(11): Nle
  MOD_RES (13)..(13): 4-Cl-F
ERPRLGHRPXLPF

SEQ ID NO: 869 - protein, 13 aa, Artificial Sequence
  source: /note="Description of Artificial Sequence: Synthetic peptide"
  MOD_RES (1)..(1): PyroGlu
  MOD_RES (4)..(4): hArg
  MOD_RES (5)..(5): NMeLeu
  MOD_RES (6)..(6): Pra
  MOD_RES (10)..(10): Oic
  MOD_RES (11)..(11): Nle
  MOD_RES (13)..(13): 4-Cl-F
ERPRLGHKGXLPF

SEQ ID NO: 870 - protein, 13 aa, Artificial Sequence
  source: /note="Description of Artificial Sequence: Synthetic peptide"
  MOD_RES (1)..(1): PyroGlu
  MOD_RES (4)..(4): hArg
  MOD_RES (5)..(5): NMeLeu
  MOD_RES (6)..(6): Pra
  MOD_RES (10)..(10): Oic
  MOD_RES (11)..(11): Nle
  MOD_RES (12)..(12): Oic
  MOD_RES (13)..(13): 4-Cl-F
ERPRLGHKGXLXF

SEQ ID NO: 871 - protein, 13 aa, Artificial Sequence
  source: /note="Description of Artificial Sequence: Synthetic peptide"
  MOD_RES (1)..(1): PyroGlu
  MOD_RES (3)..(3): Oic
  MOD_RES (4)..(4): hArg
  MOD_RES (5)..(5): NMeLeu
  MOD_RES (6)..(6): Pra
  MOD_RES (10)..(10): Oic
  MOD_RES (11)..(11): Nle
  MOD_RES (12)..(12): Oic
  MOD_RES (13)..(13): 4-Cl-F
ERXRLGHKGXLXF

SEQ ID NO: 872 - protein, 13 aa, Artificial Sequence
  source: /note="Description of Artificial Sequence: Synthetic peptide"
  MOD_RES (1)..(1): PyroGlu
  MOD_RES (3)..(3): Oic
  MOD_RES (4)..(4): hArg
  MOD_RES (5)..(5): NMeLeu
  MOD_RES (6)..(6): Pra
  MOD_RES (10)..(10): Oic
  MOD_RES (11)..(11): Nle
  MOD_RES (13)..(13): 4-Cl-F
ERXRLGHKGXLPF

SEQ ID NO: 873 - protein, 13 aa, Artificial Sequence
  source: /note="Description of Artificial Sequence: Synthetic peptide"
  MOD_RES (1)..(1): PyroGlu
  MOD_RES (4)..(4): NMeArg
  MOD_RES (5)..(5): NMeLeu
  MOD_RES (6)..(6): Pra
  MOD_RES (10)..(10): Oic
  MOD_RES (11)..(11): Nle
  MOD_RES (13)..(13): 4-Cl-F
ERPRLGHKGXLPF

SEQ ID NO: 874 - protein, 13 aa, Artificial Sequence
  source: /note="Description of Artificial Sequence: Synthetic peptide"
  MOD_RES (1)..(1): PyroGlu
  MOD_RES (2)..(2): NMeArg
  MOD_RES (4)..(4): hArg
  MOD_RES (5)..(5): NMeLeu
  MOD_RES (6)..(6): Pra
  MOD_RES (10)..(10): Oic
  MOD_RES (11)..(11): Nle
  MOD_RES (13)..(13): 4-Cl-F
ERPRLGHKGXLPF

SEQ ID NO: 875 - protein, 13 aa, Artificial Sequence
  source: /note="Description of Artificial Sequence: Synthetic peptide"
  MOD_RES (1)..(1): PyroGlu
  MOD_RES (2)..(2): NMeArg
  MOD_RES (4)..(4): NMeArg
  MOD_RES (5)..(5): NMeLeu
  MOD_RES (6)..(6): Pra
  MOD_RES (10)..(10): Oic
  MOD_RES (11)..(11): Nle
  MOD_RES (13)..(13): 4-Cl-F
ERPRLGHKGXLPF

SEQ ID NO: 876 - protein, 13 aa, Artificial Sequence
  source: /note="Description of Artificial Sequence: Synthetic peptide"
  MOD_RES (1)..(1): PyroGlu
  MOD_RES (4)..(4): hArg
  MOD_RES (5)..(5): NMeLeu
  MOD_RES (6)..(6): Pra
  MOD_RES (8)..(8): 1-Nal
  MOD_RES (10)..(10): Oic
  MOD_RES (11)..(11): Nle
  MOD_RES (13)..(13): 4-Cl-F
ERPRLGHAGXLPF

SEQ ID NO: 877 - protein, 13 aa, Artificial Sequence
  source: /note="Description of Artificial Sequence: Synthetic peptide"
  MOD_RES (1)..(1): PyroGlu
  MOD_RES (4)..(4): hArg
  MOD_RES (5)..(5): NMeLeu
  MOD_RES (6)..(6): Pra
  MOD_RES (8)..(8): 1-Nal
  MOD_RES (10)..(10): Oic
  MOD_RES (11)..(11): Nle
  MOD_RES (12)..(12): Oic
  MOD_RES (13)..(13): 4-Cl-F
ERPRLGHAGXLXF

SEQ ID NO: 878 - protein, 14 aa, Artificial Sequence
  source: /note="Description of Artificial Sequence: Synthetic peptide"
  source: /note="N-term Acetyl"
  MOD_RES (1)..(1): Pra
  MOD_RES (5)..(5): hArg
  MOD_RES (6)..(6): NMeLeu
  MOD_RES (7)..(7): Pra
  MOD_RES (9)..(9): Dab
  MOD_RES (12)..(12): Nle
  MOD_RES (14)..(14): 4-Cl-F
GLRPRLGHXGPLPF

SEQ ID NO: 879 - protein, 13 aa, Artificial Sequence
  source: /note="Description of Artificial Sequence: Synthetic peptide"
  MOD_RES (1)..(1): PyroGlu
  MOD_RES (3)..(3): Oic
  MOD_RES (4)..(4): hArg
  MOD_RES (5)..(5): NMeLeu
  MOD_RES (6)..(6): Pra
  MOD_RES (8)..(8): 1-Nal
  MOD_RES (10)..(10): Oic
  MOD_RES (11)..(11): Nle
  MOD_RES (12)..(12): Oic
  MOD_RES (13)..(13): 4-Cl-F
ERXRLGHAGXLXF

SEQ ID NO: 880 - protein, 13 aa, Artificial Sequence
  source: /note="Description of Artificial Sequence: Synthetic peptide"
  MOD_RES (1)..(1): PyroGlu
  MOD_RES (3)..(3): Oic
  MOD_RES (4)..(4): hArg
  MOD_RES (5)..(5): NMeLeu
  MOD_RES (6)..(6): Pra
  MOD_RES (8)..(8): 1-Nal
  MOD_RES (10)..(10): Oic
  MOD_RES (11)..(11): Nle
  MOD_RES (13)..(13): 4-Cl-F
ERXRLGHAGXLPF

SEQ ID NO: 881 - protein, 13 aa, Artificial Sequence
  source: /note="Description of Artificial Sequence: Synthetic peptide"
  MOD_RES (1)..(1): PyroGlu
  MOD_RES (4)..(4): NMeArg
  MOD_RES (5)..(5): NMeLeu
  MOD_RES (6)..(6): Pra
  MOD_RES (8)..(8): 1-Nal
  MOD_RES (10)..(10): Oic
  MOD_RES (11)..(11): Nle
  MOD_RES (13)..(13): 4-Cl-F
ERPRLGHAGXLPF

SEQ ID NO: 882 - protein, 13 aa, Artificial Sequence
  source: /note="Description of Artificial Sequence: Synthetic peptide"
  MOD_RES (1)..(1): PyroGlu
  MOD_RES (2)..(2): NMeArg
  MOD_RES (4)..(4): hArg
  MOD_RES (5)..(5): NMeLeu
  MOD_RES (6)..(6): Pra
  MOD_RES (8)..(8): 1-Nal
  MOD_RES (10)..(10): Oic
  MOD_RES (11)..(11): Nle
  MOD_RES (13)..(13): 4-Cl-F
ERPRLGHAGXLPF

SEQ ID NO: 883 - protein, 13 aa, Artificial Sequence
  source: /note="Description of Artificial Sequence: Synthetic peptide"
  MOD_RES (1)..(1): PyroGlu
  MOD_RES (2)..(2): NMeArg
  MOD_RES (4)..(4): NMeArg
  MOD_RES (5)..(5): NMeLeu
  MOD_RES (6)..(6): Pra
  MOD_RES (8)..(8): 1-Nal
  MOD_RES (10)..(10): Oic
  MOD_RES (11)..(11): Nle
  MOD_RES (13)..(13): 4-Cl-F
ERPRLGHAGXLPF

SEQ ID NO: 884 - protein, 13 aa, Artificial Sequence
  source: /note="Description of Artificial Sequence: Synthetic peptide"
  MOD_RES (1)..(1): PyroGlu
  MOD_RES (4)..(4): hArg
  MOD_RES (5)..(5): NMeLeu
  MOD_RES (6)..(6): Pra
  MOD_RES (8)..(8): LYSIPR
  MOD_RES (10)..(10): Oic
  MOD_RES (11)..(11): Nle
  MOD_RES (13)..(13): 4-Cl-F
ERPRLGHKGXLPF

SEQ ID NO: 885 - protein, 13 aa, Artificial Sequence
  source: /note="Description of Artificial Sequence: Synthetic peptide"
  MOD_RES (1)..(1): PyroGlu
  MOD_RES (4)..(4): hArg
  MOD_RES (5)..(5): NMeLeu
  MOD_RES (6)..(6): Pra
  MOD_RES (8)..(8): K(Me2)
  MOD_RES (10)..(10): Oic
  MOD_RES (11)..(11): Nle
  MOD_RES (13)..(13): 4-Cl-F
ERPRLGHKGXLPF

SEQ ID NO: 886 - protein, 17 aa, Artificial Sequence
  source: /note="Description of Artificial Sequence: Synthetic peptide"
  MOD_RES (8)..(8): hArg
  MOD_RES (9)..(9): Cha
  MOD_RES (14)..(14): Oic
  MOD_RES (15)..(15): Nle
  MOD_RES (17)..(17): 4-Cl-F
KFRRQRPRASHKGXLPF

SEQ ID NO: 887 - protein, 17 aa, Artificial Sequence
  source: /note="Description of Artificial Sequence: Synthetic peptide"
  source: /note="N-term MeS-Propionyl"
  MOD_RES (8)..(8): hArg
  MOD_RES (9)..(9): Cha
  MOD_RES (14)..(14): Oic
  MOD_RES (15)..(15): Nle
  MOD_RES (17)..(17): 4-Cl-F
KFRRQRPRASHKGXLPF

SEQ ID NO: 888 - protein, 18 aa, Artificial Sequence
  source: /note="Description of Artificial Sequence: Synthetic peptide"
  MOD_RES (1)..(1): Pra
  MOD_RES (9)..(9): hArg
  MOD_RES (10)..(10): Cha
  MOD_RES (15)..(15): Oic
  MOD_RES (16)..(16): Nle
  MOD_RES (18)..(18): 4-Cl-F
GKFRRQRPRASHKGXLPF

SEQ ID NO: 889 - protein, 27 aa, Artificial Sequence
  source: /note="Description of Artificial Sequence: Synthetic peptide"
  MOD_RES (1)..(1): Pra
  MOD_RES (18)..(18): hArg
  MOD_RES (19)..(19): Cha
  MOD_RES (24)..(24): Oic
  MOD_RES (25)..(25): Nle
  MOD_RES (27)..(27): 4-Cl-F
GPGPWQGGRRKFRRQRPRASHKGXLPF

SEQ ID NO: 890 - protein, 37 aa, Artificial Sequence; identical to SEQ ID NO: 250
  source: /note="Description of Artificial Sequence: Synthetic polypeptide"
  MOD_RES (1)..(1): Pra
  MOD_RES (28)..(28): hArg
  MOD_RES (29)..(29): Cha
  MOD_RES (34)..(34): Oic
  MOD_RES (35)..(35): Nle
  MOD_RES (37)..(37): 4-Cl-F

SEQ ID NO: 891 - protein, 18 aa, Artificial Sequence
  source: /note="Description of Artificial Sequence: Synthetic peptide"
  MOD_RES (1)..(1): Pra
  MOD_RES (4)..(5): hArg
  MOD_RES (9)..(9): hArg
  MOD_RES (10)..(10): Cha
  MOD_RES (15)..(15): Oic
  MOD_RES (16)..(16): Nle
  MOD_RES (18)..(18): 4-Cl-F
GKFRRQRPRASHKGXLPF

SEQ ID NO: 892 - protein, 18 aa, Artificial Sequence
  source: /note="Description of Artificial Sequence: Synthetic peptide"
  MOD_RES (1)..(1): Pra
  MOD_RES (4)..(5): hArg
  MOD_RES (7)..(7): hArg
  MOD_RES (9)..(9): hArg
  MOD_RES (10)..(10): Cha
  MOD_RES (15)..(15): Oic
  MOD_RES (16)..(16): Nle
  MOD_RES (18)..(18): 4-Cl-F
GKFRRQRPRASHKGXLPF

SEQ ID NO: 893 - protein, 18 aa, Artificial Sequence
  source: /note="Description of Artificial Sequence: Synthetic peptide"
  MOD_RES (1)..(1): Pra
  MOD_RES (4)..(5): hArg
  MOD_RES (9)..(9): hArg
  MOD_RES (10)..(10): Cha
  MOD_RES (15)..(15): Oic
  MOD_RES (16)..(16): Nle
  MOD_RES (18)..(18): 4-Cl-F
GKFRRQQPRASHKGXLPF

SEQ ID NO: 894 - protein, 18 aa, Artificial Sequence
  source: /note="Description of Artificial Sequence: Synthetic peptide"
  MOD_RES (1)..(1): Pra
  MOD_RES (4)..(5): hArg
  MOD_RES (7)..(7): Cit
  MOD_RES (9)..(9): hArg
  MOD_RES (10)..(10): Cha
  MOD_RES (15)..(15): Oic
  MOD_RES (16)..(16): Nle
  MOD_RES (18)..(18): 4-Cl-F
GKFRRQXPRASHKGXLPF

SEQ ID NO: 895 - protein, 18 aa, Artificial Sequence
  source: /note="Description of Artificial Sequence: Synthetic peptide"
  MOD_RES (1)..(1): Pra
  MOD_RES (4)..(4): hArg
  MOD_RES (5)..(5): Cit
  MOD_RES (7)..(7): Cit
  MOD_RES (9)..(9): hArg
  MOD_RES (10)..(10): Cha
  MOD_RES (15)..(15): Oic
  MOD_RES (16)..(16): Nle
  MOD_RES (18)..(18): 4-Cl-F
GKFRXQXPRASHKGXLPF

SEQ ID NO: 896 - protein, 18 aa, Artificial Sequence
  source: /note="Description of Artificial Sequence: Synthetic peptide"
  MOD_RES (1)..(1): Pra
  MOD_RES (4)..(5): Cit
  MOD_RES (7)..(7): hArg
  MOD_RES (9)..(9): hArg
  MOD_RES (10)..(10): Cha
  MOD_RES (15)..(15): Oic
  MOD_RES (16)..(16): Nle
  MOD_RES (18)..(18): 4-Cl-F
GKFXXQRPRASHKGXLPF

SEQ ID NO: 897 - protein, 18 aa, Artificial Sequence
  source: /note="Description of Artificial Sequence: Synthetic peptide"
  MOD_RES (1)..(1): Pra
  MOD_RES (4)..(5): Cit
  MOD_RES (7)..(7): Cit
  MOD_RES (9)..(9): hArg
  MOD_RES (10)..(10): Cha
  MOD_RES (15)..(15): Oic
  MOD_RES (16)..(16): Nle
  MOD_RES (18)..(18): 4-Cl-F
GKFXXQXPRASHKGXLPF

SEQ ID NO: 898 - protein, 18 aa, Artificial Sequence
  source: /note="Description of Artificial Sequence: Synthetic peptide"
  MOD_RES (1)..(1): Pra
  MOD_RES (2)..(2): Orn
  MOD_RES (9)..(9): hArg
  MOD_RES (10)..(10): Cha
  MOD_RES (15)..(15): Oic
  MOD_RES (16)..(16): Nle
  MOD_RES (18)..(18): 4-Cl-F
GXFRRQRPRASHKGXLPF

SEQ ID NO: 899 - protein, 18 aa, Artificial Sequence
  source: /note="Description of Artificial Sequence: Synthetic peptide"
  MOD_RES (1)..(1): Pra
  MOD_RES (2)..(2): Orn
  MOD_RES (4)..(5): hArg
  MOD_RES (7)..(7): hArg
  MOD_RES (9)..(9): hArg
  MOD_RES (10)..(10): Cha
  MOD_RES (15)..(15): Oic
  MOD_RES (16)..(16): Nle
  MOD_RES (18)..(18): 4-Cl-F
GXFRRQRPRASHKGXLPF

SEQ ID NO: 900 - protein, 17 aa, Artificial Sequence
  source: /note="Description of Artificial Sequence: Synthetic peptide"
  MOD_RES (1)..(1): Pra
  MOD_RES (8)..(8): hArg
  MOD_RES (9)..(9): Cha
  MOD_RES (14)..(14): Oic
  MOD_RES (15)..(15): Nle
  MOD_RES (17)..(17): 4-Cl-F
GFRRQRPRASHKGXLPF

SEQ ID NO: 901 - protein, 13 aa, Artificial Sequence
  source: /note="Description of Artificial Sequence: Synthetic peptide"
  source: /note="N-term Bromoacetyl-NPEG11"
  MOD_RES (4)..(4): hArg
  MOD_RES (5)..(5): Cha
  MOD_RES (10)..(10): Oic
  MOD_RES (11)..(11): Nle
  MOD_RES (13)..(13): 4-Cl-F
LRPRASHKGXLPF

SEQ ID NO: 902 - protein, 17 aa, Artificial Sequence
  source: /note="Description of Artificial Sequence: Synthetic peptide"
  source: /note="N-term Bromoacetyl-NPEG11"
  MOD_RES (8)..(8): hArg
  MOD_RES (9)..(9): Cha
  MOD_RES (14)..(14): Oic
  MOD_RES (15)..(15): Nle
  MOD_RES (17)..(17): 4-Cl-F
KFRRQRPRASHKGXLPF

SEQ ID NO: 903 - protein, 17 aa, Artificial Sequence
  source: /note="Description of Artificial Sequence: Synthetic peptide"
  source: /note="N-term Mercaptopropionyl"
  MOD_RES (8)..(8): hArg
  MOD_RES (9)..(9): Cha
  MOD_RES (14)..(14): Oic
  MOD_RES (15)..(15): Nle
  MOD_RES (17)..(17): 4-Cl-F
KFRRQRPRASHKGXLPF

SEQ ID NO: 904 - protein, 16 aa, Artificial Sequence
  source: /note="Description of Artificial Sequence: Synthetic peptide"
  source: /note="N-term Mercaptopropionyl"
  MOD_RES (7)..(7): hArg
  MOD_RES (8)..(8): Cha
  MOD_RES (13)..(13): Oic
  MOD_RES (14)..(14): Nle
  MOD_RES (16)..(16): 4-Cl-F
FRRQRPRASHKGXLPF

SEQ ID NO: 905 - protein, 15 aa, Artificial Sequence
  source: /note="Description of Artificial Sequence: Synthetic peptide"
  source: /note="N-term Mercaptopropionyl"
  MOD_RES (6)..(6): hArg
  MOD_RES (7)..(7): Cha
  MOD_RES (12)..(12): Oic
  MOD_RES (13)..(13): Nle
  MOD_RES (15)..(15): 4-Cl-F
RRQRPRASHKGXLPF

SEQ ID NO: 906 - protein, 14 aa, Artificial Sequence
  source: /note="Description of Artificial Sequence: Synthetic peptide"
  source: /note="N-term Mercaptopropionyl"
  MOD_RES (5)..(5): hArg
  MOD_RES (6)..(6): Cha
  MOD_RES (11)..(11): Oic
  MOD_RES (12)..(12): Nle
  MOD_RES (14)..(14): 4-Cl-F
RQRPRASHKGXLPF

SEQ ID NO: 907 - protein, 13 aa, Artificial Sequence
  source: /note="Description of Artificial Sequence: Synthetic peptide"
  source: /note="N-term Mercaptopropionyl"
  MOD_RES (4)..(4): hArg
  MOD_RES (5)..(5): Cha
  MOD_RES (10)..(10): Oic
  MOD_RES (11)..(11): Nle
  MOD_RES (13)..(13): 4-Cl-F
QRPRASHKGXLPF

SEQ ID NO: 908 - protein, 13 aa, Artificial Sequence
  source: /note="Description of Artificial Sequence: Synthetic peptide"
  source: /note="N-term Mercaptopropionyl"
  MOD_RES (4)..(4): hArg
  MOD_RES (5)..(5): Cha
  MOD_RES (10)..(10): Oic
  MOD_RES (11)..(11): Nle
  MOD_RES (13)..(13): 4-Cl-F
LRPRASHKGXLPF

SEQ ID NO: 909 - protein, 14 aa, Artificial Sequence
  source: /note="Description of Artificial Sequence: Synthetic peptide"
  source: /note="N-term Mercaptopropionyl"
  MOD_RES (5)..(5): hArg
  MOD_RES (6)..(6): Cha
  MOD_RES (11)..(11): Oic
  MOD_RES (12)..(12): Nle
  MOD_RES (14)..(14): 4-Cl-F
LLRPRASHKGXLPF

SEQ ID NO: 910 - protein, 14 aa, Artificial Sequence
  source: /note="Description of Artificial Sequence: Synthetic peptide"
  MOD_RES (1)..(1): Pra
  MOD_RES (5)..(5): hArg
  MOD_RES (6)..(6): Cha
  MOD_RES (11)..(11): Oic
  MOD_RES (12)..(12): Nle
  MOD_RES (14)..(14): 4-Cl-F
GLRPRASHKGXLPF

SEQ ID NO: 911 - protein, 13 aa, Artificial Sequence
  source: /note="Description of Artificial Sequence: Synthetic peptide"
  MOD_RES (1)..(1): PyroGlu
  MOD_RES (4)..(4): hArg
  MOD_RES (5)..(5): Cha
  MOD_RES (6)..(6): Pra
  MOD_RES (10)..(10): Oic
  MOD_RES (11)..(11): Nle
  MOD_RES (13)..(13): 4-Cl-F
ERPRAGHKGXLPF

SEQ ID NO: 912 - protein, 13 aa, Artificial Sequence
  source: /note="Description of Artificial Sequence: Synthetic peptide"
  MOD_RES (1)..(1): PyroGlu
  MOD_RES (4)..(4): hArg
  MOD_RES (5)..(5): Cha
  MOD_RES (7)..(7): Pra
  MOD_RES (10)..(10): Oic
  MOD_RES (11)..(11): Nle
  MOD_RES (13)..(13): 4-Cl-F
ERPRASGKGXLPF

SEQ ID NO: 913 - protein, 17 aa, Artificial Sequence
  source: /note="Description of Artificial Sequence: Synthetic peptide"
  source: /note="N-term MeS-Propionyl"
  MOD_RES (8)..(8): hArg
  MOD_RES (9)..(9): Cha
  MOD_RES (14)..(14): Oic
  MOD_RES (15)..(15): Nle
  MOD_RES (17)..(17): 4-Cl-F
KFRRLRPRASHKGXLPF

SEQ ID NO: 914 - protein, 17 aa, Artificial Sequence
  source: /note="Description of Artificial Sequence: Synthetic peptide"
  source: /note="N-term MeS-Propionyl"
  MOD_RES (8)..(8): hArg
  MOD_RES (9)..(9): Cha
  MOD_RES (14)..(14): Oic
  MOD_RES (15)..(15): Nle
  MOD_RES (17)..(17): 4-Cl-F
KFRRARPRASHKGXLPF

SEQ ID NO: 915 - protein, 17 aa, Artificial Sequence
  source: /note="Description of Artificial Sequence: Synthetic peptide"
  source: /note="N-term MeS-Propionyl"
  MOD_RES (8)..(8): hArg
  MOD_RES (9)..(9): Cha
  MOD_RES (14)..(14): Oic
  MOD_RES (15)..(15): Nle
  MOD_RES (17)..(17): 4-Cl-F
KFRRVRPRASHKGXLPF

SEQ ID NO: 916 - protein, 17 aa, Artificial Sequence
  source: /note="Description of Artificial Sequence: Synthetic peptide"
  source: /note="N-term MeS-Propionyl"
  MOD_RES (8)..(8): hArg
  MOD_RES (9)..(9): Cha
  MOD_RES (14)..(14): Oic
  MOD_RES (15)..(15): Nle
  MOD_RES (17)..(17): 4-Cl-F
KFRRIRPRASHKGXLPF

SEQ ID NO: 917 - protein, 17 aa, Artificial Sequence
  source: /note="Description of Artificial Sequence: Synthetic peptide"
  source: /note="N-term MeS-Propionyl"
  MOD_RES (8)..(8): hArg
  MOD_RES (9)..(9): Cha
  MOD_RES (14)..(14): Oic
  MOD_RES (15)..(15): Nle
  MOD_RES (17)..(17): 4-Cl-F
KFRRFRPRASHKGXLPF

SEQ ID NO: 918 - protein, 17 aa, Artificial Sequence
  source: /note="Description of Artificial Sequence: Synthetic peptide"
  source: /note="N-term MeS-Propionyl"
  MOD_RES (8)..(8): hArg
  MOD_RES (9)..(9): Cha
  MOD_RES (14)..(14): Oic
  MOD_RES (15)..(15): Nle
  MOD_RES (17)..(17): 4-Cl-F
KFRRYRPRASHKGXLPF

SEQ ID NO: 919 - protein, 17 aa, Artificial Sequence
  source: /note="Description of Artificial Sequence: Synthetic peptide"
  source: /note="N-term MeS-Propionyl"
  MOD_RES (6)..(6): hArg
  MOD_RES (8)..(8): hArg
  MOD_RES (9)..(9): Cha
  MOD_RES (14)..(14): Oic
  MOD_RES (15)..(15): Nle
  MOD_RES (17)..(17): 4-Cl-F
KFRRLRPRASHKGXLPF

SEQ ID NO: 920 - protein, 17 aa, Artificial Sequence
  source: /note="Description of Artificial Sequence: Synthetic peptide"
  source: /note="N-term MeS-Propionyl"
  MOD_RES (8)..(8): hArg
  MOD_RES (9)..(9): Cha
  MOD_RES (14)..(14): Oic
  MOD_RES (15)..(15): Nle
  MOD_RES (17)..(17): 4-Cl-F
KFRKLRPRASHKGXLPF

SEQ ID NO: 921 - protein, 17 aa, Artificial Sequence
  source: /note="Description of Artificial Sequence: Synthetic peptide"
  source: /note="N-term MeS-Propionyl"
  MOD_RES (4)..(4): Orn
  MOD_RES (8)..(8): hArg
  MOD_RES (9)..(9): Cha
  MOD_RES (14)..(14): Oic
  MOD_RES (15)..(15): Nle
  MOD_RES (17)..(17): 4-Cl-F
KFRXLRPRASHKGXLPF

SEQ ID NO: 922 - protein, 17 aa, Artificial Sequence
  source: /note="Description of Artificial Sequence: Synthetic peptide"
  source: /note="N-term MeS-Propionyl"
  MOD_RES (8)..(8): hArg
  MOD_RES (9)..(9): Cha
  MOD_RES (14)..(14): Oic
  MOD_RES (15)..(15): Nle
  MOD_RES (17)..(17): 4-Cl-F
KFRHLRPRASHKGXLPF

SEQ ID NO: 923 - protein, 17 aa, Artificial Sequence
  source: /note="Description of Artificial Sequence: Synthetic peptide"
  source: /note="N-term MeS-Propionyl"
  MOD_RES (8)..(8): hArg
  MOD_RES (9)..(9): Cha
  MOD_RES (14)..(14): Oic
  MOD_RES (15)..(15): Nle
  MOD_RES (17)..(17): 4-Cl-F
KFRWLRPRASHKGXLPF

SEQ ID NO: 924 - protein, 17 aa, Artificial Sequence
  source: /note="Description of Artificial Sequence: Synthetic peptide"
  source: /note="N-term MeS-Propionyl"
  MOD_RES (8)..(8): hArg
  MOD_RES (9)..(9): Cha
  MOD_RES (14)..(14): Oic
  MOD_RES (15)..(15): Nle
  MOD_RES (17)..(17): 4-Cl-F
KFRFLRPRASHKGXLPF

SEQ ID NO: 925 - protein, 17 aa, Artificial Sequence
  source: /note="Description of Artificial Sequence: Synthetic peptide"
  source: /note="N-term MeS-Propionyl"
  MOD_RES (8)..(8): hArg
  MOD_RES (9)..(9): Cha
  MOD_RES (14)..(14): Oic
  MOD_RES (15)..(15): Nle
  MOD_RES (17)..(17): 4-Cl-F
KFRYLRPRASHKGXLPF

SEQ ID NO: 926 - protein, 17 aa, Artificial Sequence
  source: /note="Description of Artificial Sequence: Synthetic peptide"
  source: /note="N-term MeS-Propionyl"
  MOD_RES (4)..(4): 3Pal
  MOD_RES (8)..(8): hArg
  MOD_RES (9)..(9): Cha
  MOD_RES (14)..(14): Oic
  MOD_RES (15)..(15): Nle
  MOD_RES (17)..(17): 4-Cl-F
KFRALRPRASHKGXLPF

SEQ ID NO: 927 - protein, 17 aa, Artificial Sequence
  source: /note="Description of Artificial Sequence: Synthetic peptide"
  source: /note="N-term MeS-Propionyl"
  MOD_RES (4)..(4): 2Pal
  MOD_RES (8)..(8): hArg
  MOD_RES (9)..(9): Cha
  MOD_RES (14)..(14): Oic
  MOD_RES (15)..(15): Nle
  MOD_RES (17)..(17): 4-Cl-F
KFRALRPRASHKGXLPF

SEQ ID NO: 928 - protein, 17 aa, Artificial Sequence
  source: /note="Description of Artificial Sequence: Synthetic peptide"
  source: /note="N-term MeS-Propionyl"
  MOD_RES (8)..(8): hArg
  MOD_RES (9)..(9): Cha
  MOD_RES (14)..(14): Oic
  MOD_RES (15)..(15): Nle
  MOD_RES (17)..(17): 4-Cl-F
KFHRLRPRASHKGXLPF

SEQ ID NO: 929 - protein, 17 aa, Artificial Sequence
  source: /note="Description of Artificial Sequence: Synthetic peptide"
  source: /note="N-term MeS-Propionyl"
  MOD_RES (8)..(8): hArg
  MOD_RES (9)..(9): Cha
  MOD_RES (14)..(14): Oic
  MOD_RES (15)..(15): Nle
  MOD_RES (17)..(17): 4-Cl-F
KFWRLRPRASHKGXLPF

SEQ ID NO: 930 - protein, 17 aa, Artificial Sequence
  source: /note="Description of Artificial Sequence: Synthetic peptide"
  source: /note="N-term MeS-Propionyl"
  MOD_RES (8)..(8): hArg
  MOD_RES (9)..(9): Cha
  MOD_RES (14)..(14): Oic
  MOD_RES (15)..(15): Nle
  MOD_RES (17)..(17): 4-Cl-F
KFFRLRPRASHKGXLPF

SEQ ID NO: 931 - protein, 17 aa, Artificial Sequence
  source: /note="Description of Artificial Sequence: Synthetic peptide"
  source: /note="N-term MeS-Propionyl"
  MOD_RES (8)..(8): hArg
  MOD_RES (9)..(9): Cha
  MOD_RES (14)..(14): Oic
  MOD_RES (15)..(15): Nle
  MOD_RES (17)..(17): 4-Cl-F
KFYRLRPRASHKGXLPF

SEQ ID NO: 932 - protein, 17 aa, Artificial Sequence
  source: /note="Description of Artificial Sequence: Synthetic peptide"
  source: /note="N-term MeS-Propionyl"
  MOD_RES (3)..(3): 3Pal
  MOD_RES (8)..(8): hArg
  MOD_RES (9)..(9): Cha
  MOD_RES (14)..(14): Oic
  MOD_RES (15)..(15): Nle
  MOD_RES (17)..(17): 4-Cl-F
KFARLRPRASHKGXLPF

SEQ ID NO: 933 - protein, 17 aa, Artificial Sequence
  source: /note="Description of Artificial Sequence: Synthetic peptide"
  source: /note="N-term MeS-Propionyl"
  MOD_RES (3)..(3): 2Pal
  MOD_RES (8)..(8): hArg
  MOD_RES (9)..(9): Cha
  MOD_RES (14)..(14): Oic
  MOD_RES (15)..(15): Nle
  MOD_RES (17)..(17): 4-Cl-F
KFARLRPRASHKGXLPF

SEQ ID NO: 934 - protein, 16 aa, Artificial Sequence
  source: /note="Description of Artificial Sequence: Synthetic peptide"
  source: /note="N-term MeS-Propionyl"
  MOD_RES (7)..(7): hArg
  MOD_RES (8)..(8): Cha
  MOD_RES (13)..(13): Oic
  MOD_RES (14)..(14): Nle
  MOD_RES (16)..(16): 4-Cl-F
FRKLRPRASHKGXLPF

SEQ ID NO: 935 - protein, 16 aa, Artificial Sequence
  source: /note="Description of Artificial Sequence: Synthetic peptide"
  source: /note="N-term MeS-Propionyl"
  MOD_RES (3)..(3): Orn
  MOD_RES (7)..(7): hArg
  MOD_RES (8)..(8): Cha
  MOD_RES (13)..(13): Oic
  MOD_RES (14)..(14): Nle
  MOD_RES (16)..(16): 4-Cl-F
FRXLRPRASHKGXLPF

SEQ ID NO: 936 - protein, 16 aa, Artificial Sequence
  source: /note="Description of Artificial Sequence: Synthetic peptide"
  source: /note="N-term MeS-Propionyl"
  MOD_RES (7)..(7): hArg
  MOD_RES (8)..(8): Cha
  MOD_RES (13)..(13): Oic
  MOD_RES (14)..(14): Nle
  MOD_RES (16)..(16): 4-Cl-F
FRHLRPRASHKGXLPF

SEQ ID NO: 937 - protein, 16 aa, Artificial Sequence
  source: /note="Description of Artificial Sequence: Synthetic peptide"
  source: /note="N-term MeS-Propionyl"
  MOD_RES (7)..(7): hArg
  MOD_RES (8)..(8): Cha
  MOD_RES (13)..(13): Oic
  MOD_RES (14)..(14): Nle
  MOD_RES (16)..(16): 4-Cl-F
FRWLRPRASHKGXLPF

SEQ ID NO: 938 - protein, 16 aa, Artificial Sequence
  source: /note="Description of Artificial Sequence: Synthetic peptide"
  source: /note="N-term MeS-Propionyl"
  MOD_RES (7)..(7): hArg
  MOD_RES (8)..(8): Cha
  MOD_RES (13)..(13): Oic
  MOD_RES (14)..(14): Nle
  MOD_RES (16)..(16): 4-Cl-F
FRFLRPRASHKGXLPF

SEQ ID NO: 939 - protein, 16 aa, Artificial Sequence
  source: /note="Description of Artificial Sequence: Synthetic peptide"
  source: /note="N-term MeS-Propionyl"
  MOD_RES (7)..(7): hArg
  MOD_RES (8)..(8): Cha
  MOD_RES (13)..(13): Oic
  MOD_RES (14)..(14): Nle
  MOD_RES (16)..(16): 4-Cl-F
FRYLRPRASHKGXLPF

SEQ ID NO: 940 - protein, 16 aa, Artificial Sequence
  source: /note="Description of Artificial Sequence: Synthetic peptide"
  source: /note="N-term MeS-Propionyl"
  MOD_RES (7)..(7): hArg
  MOD_RES (8)..(8): Cha
  MOD_RES (13)..(13): Oic
  MOD_RES (14)..(14): Nle
  MOD_RES (16)..(16): 4-Cl-F
FKRLRPRASHKGXLPF

SEQ ID NO: 941 - protein, 16 aa, Artificial Sequence
  source: /note="Description of Artificial Sequence: Synthetic peptide"
  source: /note="N-term MeS-Propionyl"
  MOD_RES (2)..(2): Orn
  MOD_RES (7)..(7): hArg
  MOD_RES (8)..(8): Cha
  MOD_RES (13)..(13): Oic
  MOD_RES (14)..(14): Nle
  MOD_RES (16)..(16): 4-Cl-F
FXRLRPRASHKGXLPF

SEQ ID NO: 942 - protein, 16 aa, Artificial Sequence
  source: /note="Description of Artificial Sequence: Synthetic peptide"
  source: /note="N-term MeS-Propionyl"
  MOD_RES (7)..(7): hArg
  MOD_RES (8)..(8): Cha
  MOD_RES (13)..(13): Oic
  MOD_RES (14)..(14): Nle
  MOD_RES (16)..(16): 4-Cl-F
FHRLRPRASHKGXLPF

SEQ ID NO: 943 - protein, 16 aa, Artificial Sequence
  source: /note="Description of Artificial Sequence: Synthetic peptide"
  source: /note="N-term MeS-Propionyl"
  MOD_RES (7)..(7): hArg
  MOD_RES (8)..(8): Cha
  MOD_RES (13)..(13): Oic
  MOD_RES (14)..(14): Nle
  MOD_RES (16)..(16): 4-Cl-F
FWRLRPRASHKGXLPF

SEQ ID NO: 944 - protein, 16 aa, Artificial Sequence
  source: /note="Description of Artificial Sequence: Synthetic peptide"
  source: /note="N-term MeS-Propionyl"
  MOD_RES (7)..(7): hArg
  MOD_RES (8)..(8): Cha
  MOD_RES (13)..(13): Oic
  MOD_RES (14)..(14): Nle
  MOD_RES (16)..(16): 4-Cl-F
FFRLRPRASHKGXLPF

SEQ ID NO: 945 - protein, 16 aa, Artificial Sequence
  source: /note="Description of Artificial Sequence: Synthetic peptide"
  source: /note="N-term MeS-Propionyl"
  MOD_RES (7)..(7): hArg
  MOD_RES (8)..(8): Cha
  MOD_RES (13)..(13): Oic
  MOD_RES (14)..(14): Nle
  MOD_RES (16)..(16): 4-Cl-F
FYRLRPRASHKGXLPF

SEQ ID NO: 946 - protein, 16 aa, Artificial Sequence
  source: /note="Description of Artificial Sequence: Synthetic peptide"
  source: /note="N-term MeS-Propionyl"
  MOD_RES (2)..(2): 3Pal
  MOD_RES (7)..(7): hArg
  MOD_RES (8)..(8): Cha
  MOD_RES (13)..(13): Oic
  MOD_RES (14)..(14): Nle
  MOD_RES (16)..(16): 4-Cl-F
FARLRPRASHKGXLPF

SEQ ID NO: 947 - protein, 16 aa, Artificial Sequence
  source: /note="Description of Artificial Sequence: Synthetic peptide"
  source: /note="N-term MeS-Propionyl"
  MOD_RES (2)..(2): 2Pal
  MOD_RES (7)..(7): hArg
  MOD_RES (8)..(8): Cha
  MOD_RES (13)..(13): Oic
  MOD_RES (14)..(14): Nle
  MOD_RES (16)..(16): 4-Cl-F
FARLRPRASHKGXLPF

SEQ ID NO: 948 - protein, 17 aa, Artificial Sequence
  source: /note="Description of Artificial Sequence: Synthetic peptide"
  source: /note="N-term MeS-Propionyl"
  MOD_RES (6)..(6): hArg
  MOD_RES (8)..(8): hArg
  MOD_RES (9)..(9): Cha
  MOD_RES (14)..(14): Oic
  MOD_RES (15)..(15): Nle
  MOD_RES (17)..(17): 4-Cl-F
KFRRLRPRASHKGXLPF

SEQ ID NO: 949 - protein, 16 aa, Artificial Sequence
  source: /note="Description of Artificial Sequence: Synthetic peptide"
  source: /note="N-term MeS-Propionyl"
  MOD_RES (5)..(5): hArg
  MOD_RES (7)..(7): hArg
  MOD_RES (8)..(8): Cha
  MOD_RES (13)..(13): Oic
  MOD_RES (14)..(14): Nle
  MOD_RES (16)..(16): 4-Cl-F
FQQLRPRASHKGXLPF

SEQ ID NO: 950 - protein, 17 aa, Artificial Sequence
  source: /note="Description of Artificial Sequence: Synthetic peptide"
  source: /note="N-term MeS-Propionyl"
  MOD_RES (3)..(4): Cit
  MOD_RES (6)..(6): hArg
  MOD_RES (8)..(8): hArg
  MOD_RES (9)..(9): Cha
  MOD_RES (14)..(14): Oic
  MOD_RES (15)..(15): Nle
  MOD_RES (17)..(17): 4-Cl-F
KFXXLRPRASHKGXLPF

SEQ ID NO: 951 - protein, 16 aa, Artificial Sequence
  source: /note="Description of Artificial Sequence: Synthetic peptide"
  source: /note="N-term MeS-Propionyl"
  MOD_RES (2)..(3): Cit
  MOD_RES (5)..(5): hArg
  MOD_RES (7)..(7): hArg
  MOD_RES (8)..(8): Cha
  MOD_RES (13)..(13): Oic
  MOD_RES (14)..(14): Nle
  MOD_RES (16)..(16): 4-Cl-F
FXXLRPRASHKGXLPF

SEQ ID NO: 952 - protein, 17 aa, Artificial Sequence
  source: /note="Description of Artificial Sequence: Synthetic peptide"
  source: /note="N-term MeS-Propionyl"
  MOD_RES (6)..(6): hArg
  MOD_RES (8)..(8): hArg
  MOD_RES (9)..(9): Cha
  MOD_RES (14)..(14): Oic
  MOD_RES (15)..(15): Nle
  MOD_RES (17)..(17): 4-Cl-F
KFARLRPRASHKGXLPF

SEQ ID NO: 953 - protein, 17 aa, Artificial Sequence
  source: /note="Description of Artificial Sequence: Synthetic peptide"
  source: /note="N-term MeS-Propionyl"
  MOD_RES (6)..(6): hArg
  MOD_RES (8)..(8): hArg
  MOD_RES (9)..(9): Cha
  MOD_RES (14)..(14): Oic
  MOD_RES (15)..(15): Nle
  MOD_RES (17)..(17): 4-Cl-F
KFERLRPRASHKGXLPF

SEQ ID NO: 954 - protein, 17 aa, Artificial Sequence
  source: /note="Description of Artificial Sequence: Synthetic peptide"
  source: /note="N-term MeS-Propionyl"
  MOD_RES (6)..(6): hArg
  MOD_RES (8)..(8): hArg
  MOD_RES (9)..(9): Cha
  MOD_RES (14)..(14): Oic
  MOD_RES (15)..(15): Nle
  MOD_RES (17)..(17): 4-Cl-F
KFTRLRPRASHKGXLPF

SEQ ID NO: 955 - protein, 17 aa, Artificial Sequence
  source: /note="Description of Artificial Sequence: Synthetic peptide"
  source: /note="N-term MeS-Propionyl"
  MOD_RES (6)..(6): hArg
  MOD_RES (8)..(8): hArg
  MOD_RES (9)..(9): Cha
  MOD_RES (14)..(14): Oic
  MOD_RES (15)..(15): Nle
  MOD_RES (17)..(17): 4-Cl-F
KFYRLRPRASHKGXLPF

SEQ ID NO: 956 - protein, 17 aa, Artificial Sequence
  source: /note="Description of Artificial Sequence: Synthetic peptide"
  source: /note="N-term MeS-Propionyl"
  MOD_RES (6)..(6): hArg
  MOD_RES (8)..(8): hArg
  MOD_RES (9)..(9): Cha
  MOD_RES (14)..(14): Oic
  MOD_RES (15)..(15): Nle
  MOD_RES (17)..(17): 4-Cl-F
KFIRLRPRASHKGXLPF

SEQ ID NO: 957 - protein, 17 aa, Artificial Sequence
  source: /note="Description of Artificial Sequence: Synthetic peptide"
  source: /note="N-term MeS-Propionyl"
  MOD_RES (6)..(6): hArg
  MOD_RES (8)..(8): hArg
  MOD_RES (9)..(9): Cha
  MOD_RES (14)..(14): Oic
  MOD_RES (15)..(15): Nle
  MOD_RES (17)..(17): 4-Cl-F
KFPRLRPRASHKGXLPF

SEQ ID NO: 958 - protein, 17 aa, Artificial Sequence
  source: /note="Description of Artificial Sequence: Synthetic peptide"
  source: /note="N-term MeS-Propionyl"
  MOD_RES (6)..(6): hArg
  MOD_RES (8)..(8): hArg
  MOD_RES (9)..(9): Cha
  MOD_RES (14)..(14): Oic
  MOD_RES (15)..(15): Nle
  MOD_RES (17)..(17): 4-Cl-F
KFSRLRPRASHKGXLPF

SEQ ID NO: 959 - protein, 17 aa, Artificial Sequence
  source: /note="Description of Artificial Sequence: Synthetic peptide"
  source: /note="N-term MeS-Propionyl"
  MOD_RES (6)..(6): hArg
  MOD_RES (8)..(8): hArg
  MOD_RES (9)..(9): Cha
  MOD_RES (14)..(14): Oic
  MOD_RES (15)..(15): Nle
  MOD_RES (17)..(17): 4-Cl-F
KFFRLRPRASHKGXLPF

SEQ ID NO: 960 - protein, 17 aa, Artificial Sequence
  source: /note="Description of Artificial Sequence: Synthetic peptide"
  source: /note="N-term MeS-Propionyl"
  MOD_RES (6)..(6): hArg
  MOD_RES (8)..(8): hArg
  MOD_RES (9)..(9): Cha
  MOD_RES (14)..(14): Oic
  MOD_RES (15)..(15): Nle
  MOD_RES (17)..(17): 4-Cl-F
KFLRLRPRASHKGXLPF

SEQ ID NO: 961 - protein, 17 aa, Artificial Sequence
  source: /note="Description of Artificial Sequence: Synthetic peptide"
  source: /note="N-term MeS-Propionyl"
  MOD_RES (6)..(6): hArg
  MOD_RES (8)..(8): hArg
  MOD_RES (9)..(9): Cha
  MOD_RES (14)..(14): Oic
  MOD_RES (15)..(15): Nle
  MOD_RES (17)..(17): 4-Cl-F
KFVRLRPRASHKGXLPF

SEQ ID NO: 962 - protein, 17 aa, Artificial Sequence
  source: /note="Description of Artificial Sequence: Synthetic peptide"
  source: /note="N-term MeS-Propionyl"
  MOD_RES (6)..(6): hArg
  MOD_RES (8)..(8): hArg
  MOD_RES (9)..(9): Cha
  MOD_RES (14)..(14): Oic
  MOD_RES (15)..(15): Nle
  MOD_RES (17)..(17): 4-Cl-F
KFRQLRPRASHKGXLPF

SEQ ID NO: 963 - protein, 17 aa, Artificial Sequence
  source: /note="Description of Artificial Sequence: Synthetic peptide"
  source: /note="N-term MeS-Propionyl"
  MOD_RES (6)..(6): hArg
  MOD_RES (8)..(8): hArg
  MOD_RES (9)..(9): Cha
  MOD_RES (14)..(14): Oic
  MOD_RES (15)..(15): Nle
  MOD_RES (17)..(17): 4-Cl-F
KFRALRPRASHKGXLPF

SEQ ID NO: 964 - protein, 17 aa, Artificial Sequence
  source: /note="Description of Artificial Sequence: Synthetic peptide"
  source: /note="N-term MeS-Propionyl"
  MOD_RES (6)..(6): hArg
  MOD_RES (8)..(8): hArg
  MOD_RES (9)..(9): Cha
  MOD_RES (14)..(14): Oic
  MOD_RES (15)..(15): Nle
  MOD_RES (17)..(17): 4-Cl-F
KFRELRPRASHKGXLPF

SEQ ID NO: 965 - protein, 17 aa, Artificial Sequence
  source: /note="Description of Artificial Sequence: Synthetic peptide"
  source: /note="N-term MeS-Propionyl"
  MOD_RES (6)..(6): hArg
  MOD_RES (8)..(8): hArg
  MOD_RES (9)..(9): Cha
  MOD_RES (14)..(14): Oic
  MOD_RES (15)..(15): Nle
  MOD_RES (17)..(17): 4-Cl-F
KFRTLRPRASHKGXLPF

SEQ ID NO: 966 - protein, 17 aa, Artificial Sequence
  source: /note="Description of Artificial Sequence: Synthetic peptide"
  source: /note="N-term MeS-Propionyl"
  MOD_RES (6)..(6): hArg
  MOD_RES (8)..(8): hArg
  MOD_RES (9)..(9): Cha
  MOD_RES (14)..(14): Oic
  MOD_RES (15)..(15): Nle
  MOD_RES (17)..(17): 4-Cl-F
KFRYLRPRASHKGXLPF

SEQ ID NO: 967 - protein, 17 aa, Artificial Sequence
  source: /note="Description of Artificial Sequence: Synthetic peptide"
  source: /note="N-term MeS-Propionyl"
  MOD_RES (6)..(6): hArg
  MOD_RES (8)..(8): hArg
  MOD_RES (9)..(9): Cha
  MOD_RES (14)..(14): Oic
  MOD_RES (15)..(15): Nle
  MOD_RES (17)..(17): 4-Cl-F
KFRILRPRASHKGXLPF

SEQ ID NO: 968 - protein, 17 aa, Artificial Sequence
  source: /note="Description of Artificial Sequence: Synthetic peptide"
  source: /note="N-term MeS-Propionyl"
  MOD_RES (6)..(6): hArg
  MOD_RES (8)..(8): hArg
  MOD_RES (9)..(9): Cha
  MOD_RES (14)..(14): Oic
  MOD_RES (15)..(15): Nle
  MOD_RES (17)..(17): 4-Cl-F
KFRPLRPRASHKGXLPF

SEQ ID NO: 969 - protein, 17 aa, Artificial Sequence
  source: /note="Description of Artificial Sequence: Synthetic peptide"
  source: /note="N-term MeS-Propionyl"
  MOD_RES (6)..(6): hArg
  MOD_RES (8)..(8): hArg
  MOD_RES (9)..(9): Cha
  MOD_RES (14)..(14): Oic
  MOD_RES (15)..(15): Nle
  MOD_RES (17)..(17): 4-Cl-F
KFRSLRPRASHKGXLPF

SEQ ID NO: 970 - protein, 17 aa, Artificial Sequence
  source: /note="Description of Artificial Sequence: Synthetic peptide"
  source: /note="N-term MeS-Propionyl"
  MOD_RES (6)..(6): hArg
  MOD_RES (8)..(8): hArg
  MOD_RES (9)..(9): Cha
  MOD_RES (14)..(14): Oic
  MOD_RES (15)..(15): Nle
  MOD_RES (17)..(17): 4-Cl-F
KFRFLRPRASHKGXLPF

SEQ ID NO: 971 - protein, 17 aa, Artificial Sequence
  source: /note="Description of Artificial Sequence: Synthetic peptide"
  source: /note="N-term MeS-Propionyl"
  MOD_RES (6)..(6): hArg
  MOD_RES (8)..(8): hArg
  MOD_RES (9)..(9): Cha
  MOD_RES (14)..(14): Oic
  MOD_RES (15)..(15): Nle
  MOD_RES (17)..(17): 4-Cl-F
KFRLLRPRASHKGXLPF

SEQ ID NO: 972 - protein, 17 aa, Artificial Sequence
  source: /note="Description of Artificial Sequence: Synthetic peptide"
  source: /note="N-term MeS-Propionyl"
  MOD_RES (6)..(6): hArg
  MOD_RES (8)..(8): hArg
  MOD_RES (9)..(9): Cha
  MOD_RES (14)..(14): Oic
  MOD_RES (15)..(15): Nle
  MOD_RES (17)..(17): 4-Cl-F
KFRVLRPRASHKGXLPF

SEQ ID NO: 973 - protein, 16 aa, Artificial Sequence
  source: /note="Description of Artificial Sequence: Synthetic peptide"
  source: /note="N-term MeS-Propionyl"
  MOD_RES (5)..(5): hArg
  MOD_RES (7)..(7): hArg
  MOD_RES (8)..(8): Cha
  MOD_RES (13)..(13): Oic
  MOD_RES (14)..(14): Nle
  MOD_RES (16)..(16): 4-Cl-F
FARLRPRASHKGXLPF

SEQ ID NO: 974 - protein, 16 aa, Artificial Sequence
  source: /note="Description of Artificial Sequence: Synthetic peptide"
  source: /note="N-term MeS-Propionyl"
  MOD_RES (5)..(5): hArg
  MOD_RES (7)..(7): hArg
  MOD_RES (8)..(8): Cha
  MOD_RES (13)..(13): Oic
  MOD_RES (14)..(14): Nle
  MOD_RES (16)..(16): 4-Cl-F
FERLRPRASHKGXLPF

SEQ ID NO: 975 - protein, 16 aa, Artificial Sequence
  source: /note="Description of Artificial Sequence: Synthetic peptide"
  source: /note="N-term MeS-Propionyl"
  MOD_RES (5)..(5): hArg
  MOD_RES (7)..(7): hArg
  MOD_RES (8)..(8): Cha
  MOD_RES (13)..(13): Oic
  MOD_RES (14)..(14): Nle
  MOD_RES (16)..(16): 4-Cl-F
FTRLRPRASHKGXLPF

SEQ ID NO: 976 - protein, 16 aa, Artificial Sequence
  source: /note="Description of Artificial Sequence: Synthetic peptide"
  source: /note="N-term MeS-Propionyl"
  MOD_RES (5)..(5): hArg
  MOD_RES (7)..(7): hArg
  MOD_RES (8)..(8): Cha
  MOD_RES (13)..(13): Oic
  MOD_RES (14)..(14): Nle
  MOD_RES (16)..(16): 4-Cl-F
FYRLRPRASHKGXLPF

SEQ ID NO: 977 - protein, 16 aa, Artificial Sequence
  source: /note="Description of Artificial Sequence: Synthetic peptide"
  source: /note="N-term MeS-Propionyl"
  MOD_RES (5)..(5): hArg
  MOD_RES (7)..(7): hArg
  MOD_RES (8)..(8): Cha
  MOD_RES (13)..(13): Oic
  MOD_RES (14)..(14): Nle
  MOD_RES (16)..(16): 4-Cl-F
FIRLRPRASHKGXLPF

SEQ ID NO: 978 - protein, 16 aa, Artificial Sequence
  source: /note="Description of Artificial Sequence: Synthetic peptide"
  source: /note="N-term MeS-Propionyl"
  MOD_RES (5)..(5): hArg
  MOD_RES (7)..(7): hArg
  MOD_RES (8)..(8): Cha
  MOD_RES (13)..(13): Oic
  MOD_RES (14)..(14): Nle
  MOD_RES (16)..(16): 4-Cl-F
FPRLRPRASHKGXLPF

SEQ ID NO: 979 - protein, 16 aa, Artificial Sequence
  source: /note="Description of Artificial Sequence: Synthetic peptide"
  source: /note="N-term MeS-Propionyl"
  MOD_RES (5)..(5): hArg
  MOD_RES (7)..(7): hArg
  MOD_RES (8)..(8): Cha
  MOD_RES (13)..(13): Oic
  MOD_RES (14)..(14): Nle
  MOD_RES (16)..(16): 4-Cl-F
FSRLRPRASHKGXLPF

SEQ ID NO: 980 - protein, 16 aa, Artificial Sequence
  source: /note="Description of Artificial Sequence: Synthetic peptide"
  source: /note="N-term MeS-Propionyl"
  MOD_RES (5)..(5): hArg
  MOD_RES (7)..(7): hArg
  MOD_RES (8)..(8): Cha
  MOD_RES (13)..(13): Oic
  MOD_RES (14)..(14): Nle
  MOD_RES (16)..(16): 4-Cl-F
FFRLRPRASHKGXLPF

SEQ ID NO: 981 - protein, 16 aa, Artificial Sequence
  source: /note="Description of Artificial Sequence: Synthetic peptide"
  source: /note="N-term MeS-Propionyl"
  MOD_RES (5)..(5): hArg
  MOD_RES (7)..(7): hArg
  MOD_RES (8)..(8): Cha
  MOD_RES (13)..(13): Oic
  MOD_RES (14)..(14): Nle
  MOD_RES (16)..(16): 4-Cl-F
FLRLRPRASHKGXLPF

SEQ ID NO: 982 - protein, 16 aa, Artificial Sequence
  source: /note="Description of Artificial Sequence: Synthetic peptide"
  source: /note="N-term MeS-Propionyl"
  MOD_RES (5)..(5): hArg
  MOD_RES (7)..(7): hArg
  MOD_RES (8)..(8): Cha
  MOD_RES (13)..(13): Oic
  MOD_RES (14)..(14): Nle
  MOD_RES (16)..(16): 4-Cl-F
FVRLRPRASHKGXLPF

SEQ ID NO: 983 - protein, 16 aa, Artificial Sequence
  source: /note="Description of Artificial Sequence: Synthetic peptide"
  source: /note="N-term MeS-Propionyl"
  MOD_RES (5)..(5): hArg
  MOD_RES (7)..(7): hArg
  MOD_RES (8)..(8): Cha
  MOD_RES (13)..(13): Oic
  MOD_RES (14)..(14): Nle
  MOD_RES (16)..(16): 4-Cl-F
FRQLRPRASHKGXLPF

SEQ ID NO: 984 - protein, 16 aa, Artificial Sequence
  source: /note="Description of Artificial Sequence: Synthetic peptide"
  source: /note="N-term MeS-Propionyl"
  MOD_RES (5)..(5): hArg
  MOD_RES (7)..(7): hArg
  MOD_RES (8)..(8): Cha
  MOD_RES (13)..(13): Oic
  MOD_RES (14)..(14): Nle
  MOD_RES (16)..(16): 4-Cl-F
FRALRPRASHKGXLPF

SEQ ID NO: 985 - protein, 16 aa, Artificial Sequence
  source: /note="Description of Artificial Sequence: Synthetic peptide"
  source: /note="N-term MeS-Propionyl"
  MOD_RES (5)..(5): hArg
  MOD_RES (7)..(7): hArg
  MOD_RES (8)..(8): Cha
  MOD_RES (13)..(13): Oic
  MOD_RES (14)..(14): Nle
  MOD_RES (16)..(16): 4-Cl-F
FRELRPRASHKGXLPF

SEQ ID NO: 986 - protein, 16 aa, Artificial Sequence
  source: /note="Description of Artificial Sequence: Synthetic peptide"
  source: /note="N-term MeS-Propionyl"
  MOD_RES (5)..(5): hArg
  MOD_RES (7)..(7): hArg
  MOD_RES (8)..(8): Cha
  MOD_RES (13)..(13): Oic
  MOD_RES (14)..(14): Nle
  MOD_RES (16)..(16): 4-Cl-F
FRTLRPRASHKGXLPF

SEQ ID NO: 987 - protein, 16 aa, Artificial Sequence
  source: /note="Description of Artificial Sequence: Synthetic peptide"
  source: /note="N-term MeS-Propionyl"
  MOD_RES (5)..(5): hArg
  MOD_RES (7)..(7): hArg
  MOD_RES (8)..(8): Cha
  MOD_RES (13)..(13): Oic
  MOD_RES (14)..(14): Nle
  MOD_RES (16)..(16): 4-Cl-F
FRYLRPRASHKGXLPF

SEQ ID NO: 988 - protein, 16 aa, Artificial Sequence
  source: /note="Description of Artificial Sequence: Synthetic peptide"
  source: /note="N-term MeS-Propionyl"
  MOD_RES (5)..(5): hArg
  MOD_RES (7)..(7): hArg
  MOD_RES (8)..(8): Cha
  MOD_RES (13)..(13): Oic
  MOD_RES (14)..(14): Nle
  MOD_RES (16)..(16): 4-Cl-F
FRILRPRASHKGXLPF

SEQ ID NO: 989 - protein, 16 aa, Artificial Sequence
  source: /note="Description of Artificial Sequence: Synthetic peptide"
  source: /note="N-term MeS-Propionyl"
  MOD_RES (5)..(5): hArg
  MOD_RES (7)..(7): hArg
  MOD_RES (8)..(8): Cha
  MOD_RES (13)..(13): Oic
  MOD_RES (14)..(14): Nle
  MOD_RES (16)..(16): 4-Cl-F
FRPLRPRASHKGXLPF

SEQ ID NO: 990 - protein, 16 aa, Artificial Sequence
  source: /note="Description of Artificial Sequence: Synthetic peptide"
  source: /note="N-term MeS-Propionyl"
  MOD_RES (5)..(5): hArg
  MOD_RES (7)..(7): hArg
  MOD_RES (8)..(8): Cha
  MOD_RES (13)..(13): Oic
  MOD_RES (14)..(14): Nle
  MOD_RES (16)..(16): 4-Cl-F
FRSLRPRASHKGXLPF

SEQ ID NO: 991 - protein, 16 aa, Artificial Sequence
  source: /note="Description of Artificial Sequence: Synthetic peptide"
  source: /note="N-term MeS-Propionyl"
  MOD_RES (5)..(5): hArg
  MOD_RES (7)..(7): hArg
  MOD_RES (8)..(8): Cha
  MOD_RES (13)..(13): Oic
  MOD_RES (14)..(14): Nle
  MOD_RES (16)..(16): 4-Cl-F
FRFLRPRASHKGXLPF

SEQ ID NO: 992 - protein, 16 aa, Artificial Sequence
  source: /note="Description of Artificial Sequence: Synthetic peptide"
  source: /note="N-term MeS-Propionyl"
  MOD_RES (5)..(5): hArg
  MOD_RES (7)..(7): hArg
  MOD_RES (8)..(8): Cha
  MOD_RES (13)..(13): Oic
  MOD_RES (14)..(14): Nle
  MOD_RES (16)..(16): 4-Cl-F
FRLLRPRASHKGXLPF

SEQ ID NO: 993 - protein, 16 aa, Artificial Sequence
  source: /note="Description of Artificial Sequence: Synthetic peptide"
  source: /note="N-term MeS-Propionyl"
  MOD_RES (5)..(5): hArg
  MOD_RES (7)..(7): hArg
  MOD_RES (8)..(8): Cha
  MOD_RES (13)..(13): Oic
  MOD_RES (14)..(14): Nle
  MOD_RES (16)..(16): 4-Cl-F
FRVLRPRASHKGXLPF

SEQ ID NO: 994 - protein, 16 aa, Artificial Sequence
  source: /note="Description of Artificial Sequence: Synthetic peptide"
  source: /note="N-term MeS-Propionyl"
  MOD_RES (8)..(8): hArg
  MOD_RES (9)..(9): Cha
  MOD_RES (14)..(14): Oic
  MOD_RES (15)..(15): Nle
  source: /note="C-term Amide"
KFRRQRPRASHKGXLP

SEQ ID NO: 995 - protein, 16 aa, Artificial Sequence
  source: /note="Description of Artificial Sequence: Synthetic peptide"
  source: /note="N-term MeS-Propionyl"
  MOD_RES (3)..(4): Cit
  MOD_RES (6)..(6): hArg
  MOD_RES (8)..(8): hArg
  MOD_RES (9)..(9): Cha
  MOD_RES (14)..(14): Oic
  MOD_RES (15)..(15): Nle
  source: /note="C-term Amide"
KFXXLRPRASHKGXLP

SEQ ID NO: 996 - protein, 15 aa, Artificial Sequence
  source: /note="Description of Artificial Sequence: Synthetic peptide"
  source: /note="N-term MeS-Propionyl"
  MOD_RES (2)..(3): Cit
  MOD_RES (5)..(5): hArg
  MOD_RES (7)..(7): hArg
  MOD_RES (8)..(8): Cha
  MOD_RES (13)..(13): Oic
  MOD_RES (14)..(14): Nle
  source: /note="C-term Amide"
FXXLRPRASHKGXLP

SEQ ID NO: 997 - protein, 16 aa, Artificial Sequence
  source: /note="Description of Artificial Sequence: Synthetic peptide"
  source: /note="N-term MeS-Propionyl"
  MOD_RES (6)..(6): hArg
  MOD_RES (8)..(8): hArg
  MOD_RES (9)..(9): Cha
  MOD_RES (14)..(14): Oic
  MOD_RES (15)..(15): Nle
  source: /note="C-term Amide"
KFRRLRPRASHKGXLP

SEQ ID NO: 998 - protein, 15 aa, Artificial Sequence
  source: /note="Description of Artificial Sequence: Synthetic peptide"
  source: /note="N-term MeS-Propionyl"
  MOD_RES (5)..(5): hArg
  MOD_RES (7)..(7): hArg
  MOD_RES (8)..(8): Cha
  MOD_RES (13)..(13): Oic
  MOD_RES (14)..(14): Nle
  source: /note="C-term Amide"
FQQLRPRASHKGXLP

SEQ ID NO: 999 - protein, 16 aa, Artificial Sequence
  source: /note="Description of Artificial Sequence: Synthetic peptide"
  source: /note="N-term MeS-Propionyl"
  MOD_RES (7)..(7): hArg
  MOD_RES (8)..(8): Cha
  MOD_RES (13)..(13): Oic
  MOD_RES (14)..(14): Nle
  MOD_RES (16)..(16): 4-Cl-F
FRRQRPRASHKGXLPF

SEQ ID NO: 1000 - protein, 16 aa, Artificial Sequence
  source: /note="Description of Artificial Sequence: Synthetic peptide"
  source: /note="N-term MeS-Propionyl"
  MOD_RES (2)..(3): hArg
  MOD_RES (5)..(5): hArg
  MOD_RES (7)..(7): hArg
  MOD_RES (8)..(8): Cha
  MOD_RES (13)..(13): Oic
  MOD_RES (14)..(14): Nle
  MOD_RES (16)..(16): 4-Cl-F
FRRQRPRASHKGXLPF

SEQ ID NO: 1001 - protein, 16 aa, Artificial Sequence
  source: /note="Description of Artificial Sequence: Synthetic peptide"
  source: /note="N-term MeS-Propionyl"
  MOD_RES (2)..(3): hArg
  MOD_RES (5)..(5): hArg
  MOD_RES (7)..(7): hArg
  MOD_RES (8)..(8): Cha
  MOD_RES (13)..(13): Oic
  MOD_RES (14)..(14): Nle
  MOD_RES (16)..(16): 4-Cl-F
ARRQRPRASHKGXLPF

SEQ ID NO: 1002 - protein, 15 aa, Artificial Sequence
  source: /note="Description of Artificial Sequence: Synthetic peptide"
  source: /note="N-term MeS-Propionyl"
  MOD_RES (4)..(4): hArg
  MOD_RES (6)..(6): hArg
  MOD_RES (7)..(7): Cha
  MOD_RES (12)..(12): Oic
  MOD_RES (13)..(13): Nle
  MOD_RES (15)..(15): 4-Cl-F
FAQRPRASHKGXLPF

SEQ ID NO: 1003 - protein, 16 aa, Artificial Sequence
  source: /note="Description of Artificial Sequence: Synthetic peptide"
  source: /note="N-term MeS-Propionyl"
  MOD_RES (2)..(2): hArg
  MOD_RES (5)..(5): hArg
  MOD_RES (7)..(7): hArg
  MOD_RES (8)..(8): Cha
  MOD_RES (13)..(13): Oic
  MOD_RES (14)..(14): Nle
  MOD_RES (16)..(16): 4-Cl-F
FRAQRPRASHKGXLPF

SEQ ID NO: 1004 - protein, 16 aa, Artificial Sequence
  source: /note="Description of Artificial Sequence: Synthetic peptide"
  source: /note="N-term MeS-Propionyl"
  MOD_RES (2)..(3): hArg
  MOD_RES (5)..(5): hArg
  MOD_RES (7)..(7): hArg
  MOD_RES (8)..(8): Cha
  MOD_RES (13)..(13): Oic
  MOD_RES (14)..(14): Nle
  MOD_RES (16)..(16): 4-Cl-F
FRRARPRASHKGXLPF

SEQ ID NO: 1005 - protein, 16 aa, Artificial Sequence
  source: /note="Description of Artificial Sequence: Synthetic peptide"
  source: /note="N-term MeS-Propionyl"
  MOD_RES (2)..(3): hArg
  MOD_RES (7)..(7): hArg
  MOD_RES (8)..(8): Cha
  MOD_RES (13)..(13): Oic
  MOD_RES (14)..(14): Nle
  MOD_RES (16)..(16): 4-Cl-F
FRRQAPRASHKGXLPF

SEQ ID NO: 1006 - protein, 16 aa, Artificial Sequence
  source: /note="Description of Artificial Sequence: Synthetic peptide"
  source: /note="N-term MeS-Propionyl"
  MOD_RES (2)..(3): hArg
  MOD_RES (5)..(5): hArg
  MOD_RES (6)..(6): Oic
  MOD_RES (7)..(7): hArg
  MOD_RES (8)..(8): Cha
  MOD_RES (13)..(13): Oic
  MOD_RES (14)..(14): Nle
  MOD_RES (16)..(16): 4-Cl-F
FRRQRXRASHKGXLPF

SEQ ID NO: 1007 - protein, 16 aa, Artificial Sequence
  source: /note="Description of Artificial Sequence: Synthetic peptide"
  source: /note="N-term MeS-Propionyl"
  MOD_RES (2)..(3): hArg
  MOD_RES (5)..(5): hArg
  MOD_RES (7)..(7): hArg
  MOD_RES (8)..(8): Cha
  MOD_RES (13)..(13): Oic
  MOD_RES (14)..(14): Nle
  MOD_RES (15)..(15): Oic
  MOD_RES (16)..(16): 4-Cl-F
FRRQRPRASHKGXLXF

SEQ ID NO: 1008 - protein, 16 aa, Artificial Sequence
  source: /note="Description of Artificial Sequence: Synthetic peptide"
  source: /note="N-term MeS-Propionyl"
  MOD_RES (2)..(3): hArg
  MOD_RES (5)..(5): hArg
  MOD_RES (6)..(6): Oic
  MOD_RES (7)..(7): hArg
  MOD_RES (8)..(8): Cha
  MOD_RES (13)..(13): Oic
  MOD_RES (14)..(14): Nle
  MOD_RES (15)..(15): Oic
  MOD_RES (16)..(16): 4-Cl-F
FRRQRXRASHKGXLXF

SEQ ID NO: 1009 - protein, 16 aa, Artificial Sequence
  source: /note="Description of Artificial Sequence: Synthetic peptide"
  source: /note="N-term MeS-Propionyl"
  MOD_RES (2)..(3): hArg
  MOD_RES (5)..(5): hArg
  MOD_RES (7)..(7): hArg
  MOD_RES (8)..(8): Cha
  MOD_RES (9)..(9): K(NPEG11)
  MOD_RES (13)..(13): Oic
  MOD_RES (14)..(14): Nle
  MOD_RES (16)..(16): 4-Cl-F
FRRQRPRAKHKGXLPF

SEQ ID NO: 1010 - protein, 16 aa, Artificial Sequence
  source: /note="Description of Artificial Sequence: Synthetic peptide"
  source: /note="N-term MeS-Propionyl"
  MOD_RES (2)..(3): hArg
  MOD_RES (5)..(5): hArg
  MOD_RES (7)..(7): hArg
  MOD_RES (8)..(8): Cha
  MOD_RES (10)..(10): K(NPEG11)
  MOD_RES (13)..(13): Oic
  MOD_RES (14)..(14): Nle
  MOD_RES (16)..(16): 4-Cl-F
FRRQRPRASKKGXLPF

SEQ ID NO: 1011 - protein, 16 aa, Artificial Sequence
  source: /note="Description of Artificial Sequence: Synthetic peptide"
  source: /note="N-term MeS-Propionyl"
  MOD_RES (2)..(3): hArg
  MOD_RES (5)..(5): hArg
  MOD_RES (7)..(7): hArg
  MOD_RES (8)..(8): Cha
  MOD_RES (11)..(11): K(NPEG11)
  MOD_RES (13)..(13): Oic
  MOD_RES (14)..(14): Nle
  MOD_RES (16)..(16): 4-Cl-F
FRRQRPRASHKGXLPF

SEQ ID NO: 1012 - protein, 16 aa, Artificial Sequence
  source: /note="Description of Artificial Sequence: Synthetic peptide"
  source: /note="N-term MeS-Propionyl"
  MOD_RES (2)..(3): hArg
  MOD_RES (5)..(5): hArg
  MOD_RES (7)..(7): hArg
  MOD_RES (8)..(8): Cha
  MOD_RES (9)..(9): Atz(PEG10)
  MOD_RES (13)..(13): Oic
  MOD_RES (14)..(14): Nle
  MOD_RES (16)..(16): 4-Cl-F
FRRQRPRAAHKGXLPF

SEQ ID NO: 1013 - protein, 16 aa, Artificial Sequence
  source: /note="Description of Artificial Sequence: Synthetic peptide"
  source: /note="N-term MeS-Propionyl"
  MOD_RES (2)..(3): hArg
  MOD_RES (5)..(5): hArg
  MOD_RES (7)..(7): hArg
  MOD_RES (8)..(8): Cha
  MOD_RES (10)..(10): Atz(PEG10)
  MOD_RES (13)..(13): Oic
  MOD_RES (14)..(14): Nle
  MOD_RES (16)..(16): 4-Cl-F
FRRQRPRASAKGXLPF

SEQ ID NO: 1014 - protein, 13 aa, Artificial Sequence
  source: /note="Description of Artificial Sequence: Synthetic peptide"
  MOD_RES (1)..(1): PyroGlu
  MOD_RES (4)..(4): hArg
  MOD_RES (5)..(5): Cha
  MOD_RES (12)..(12): 1-Nal
ERPRAFHKGPMAF

SEQ ID NO: 1015 - protein, 16 aa, Artificial Sequence
  source: /note="Description of Artificial Sequence: Synthetic peptide"
  source: /note="N-term MeS-Propionyl"
  MOD_RES (2)..(3): hArg
  MOD_RES (5)..(5): hArg
  MOD_RES (7)..(7): hArg
  MOD_RES (8)..(8): Cha
  MOD_RES (13)..(13): Oic
  MOD_RES (14)..(14): Nle
  MOD_RES (16)..(16): 4-Cl-F
FRRQRPRATHKGXLPF

SEQ ID NO: 1016 - protein, 16 aa, Artificial Sequence
  source: /note="Description of Artificial Sequence: Synthetic peptide"
  source: /note="N-term MeS-Propionyl"
  MOD_RES (2)..(3): hArg
  MOD_RES (5)..(5): hArg
  MOD_RES (7)..(7): hArg
  MOD_RES (8)..(8): Cha
  MOD_RES (13)..(13): Oic
  MOD_RES (14)..(14): Nle
  MOD_RES (16)..(16): 4-Cl-F
FRRQRPRAAHKGXLPF

SEQ ID NO: 1017 - protein, 16 aa, Artificial Sequence
  source: /note="Description of Artificial Sequence: Synthetic peptide"
  source: /note="N-term MeS-Propionyl"
  MOD_RES (2)..(3): hArg
  MOD_RES (5)..(5): hArg
  MOD_RES (7)..(7): hArg
  MOD_RES (8)..(8): Cha
  MOD_RES (9)..(9): Abu
  MOD_RES (13)..(13): Oic
  MOD_RES (14)..(14): Nle
  MOD_RES (16)..(16): 4-Cl-F
FRRQRPRAXHKGXLPF

SEQ ID NO: 1018 - protein, 16 aa, Artificial Sequence
  source: /note="Description of Artificial Sequence: Synthetic peptide"
  source: /note="N-term MeS-Propionyl"
  MOD_RES (2)..(3): hArg
  MOD_RES (5)..(5): hArg
  MOD_RES (7)..(7): hArg
  MOD_RES (8)..(8): Cha
  MOD_RES (9)..(9): Nle
  MOD_RES (13)..(13): Oic
  MOD_RES (14)..(14): Nle
  MOD_RES (16)..(16): 4-Cl-F
FRRQRPRALHKGXLPF

SEQ ID NO: 1019 - protein, 16 aa, Artificial Sequence
  source: /note="Description of Artificial Sequence: Synthetic peptide"
  source: /note="N-term MeS-Propionyl"
  MOD_RES (2)..(3): hArg
  MOD_RES (5)..(5): hArg
  MOD_RES (7)..(7): hArg
  MOD_RES (8)..(8): Cha
  MOD_RES (9)..(9): Nva
  MOD_RES (13)..(13): Oic
  MOD_RES (14)..(14): Nle
  MOD_RES (16)..(16): 4-Cl-F
FRRQRPRAVHKGXLPF

SEQ ID NO: 1020 - protein, 16 aa, Artificial Sequence
  source: /note="Description of Artificial Sequence: Synthetic peptide"
  source: /note="N-term MeS-Propionyl"
  MOD_RES (2)..(3): hArg
  MOD_RES (5)..(5): hArg
  MOD_RES (7)..(7): hArg
  MOD_RES (8)..(8): Cha
  MOD_RES (13)..(13): Oic
  MOD_RES (14)..(14): Nle
  MOD_RES (16)..(16): 4-Cl-F
FRRQRPRAVHKGXLPF

SEQ ID NO: 1021 - protein, 16 aa, Artificial Sequence
  source: /note="Description of Artificial Sequence: Synthetic peptide"
  source: /note="N-term MeS-Propionyl"
  MOD_RES (2)..(3): hArg
  MOD_RES (5)..(5): hArg
  MOD_RES (7)..(7): hArg
  MOD_RES (8)..(8): Cha
  MOD_RES (13)..(13): Oic
  MOD_RES (14)..(14): Nle
  MOD_RES (16)..(16): 4-Cl-F
FRRQRPRAGHKGXLPF

SEQ ID NO: 1022 - protein, 16 aa, Artificial Sequence
  source: /note="Description of Artificial Sequence: Synthetic peptide"
  source: /note="N-term MeS-Propionyl"
  MOD_RES (2)..(3): hArg
  MOD_RES (5)..(5): hArg
  MOD_RES (7)..(7): hArg
  MOD_RES (8)..(8): Cha
  MOD_RES (13)..(13): Oic
  MOD_RES (14)..(14): Nle
  MOD_RES (16)..(16): 4-Cl-F
FRRQRPRALHKGXLPF

SEQ ID NO: 1023 - protein, 16 aa, Artificial Sequence
  source: /note="Description of Artificial Sequence: Synthetic peptide"
  source: /note="N-term MeS-Propionyl"
  MOD_RES (2)..(3): hArg
  MOD_RES (5)..(5): hArg
  MOD_RES (7)..(7): hArg
  MOD_RES (8)..(8): Cha
  MOD_RES (13)..(13): Oic
  MOD_RES (14)..(14): Nle
  MOD_RES (16)..(16): 4-Cl-F
FRRQRPRAIHKGXLPF

SEQ ID NO: 1024 - protein, 16 aa, Artificial Sequence
  source: /note="Description of Artificial Sequence: Synthetic peptide"
  source: /note="N-term MeS-Propionyl"
  MOD_RES (2)..(3): hArg
  MOD_RES (5)..(5): hArg
  MOD_RES (7)..(7): hArg
  MOD_RES (8)..(8): Cha
  MOD_RES (9)..(9): CPG
  MOD_RES (13)..(13): Oic
  MOD_RES (14)..(14): Nle
  MOD_RES (16)..(16): 4-Cl-F
FRRQRPRAGHKGXLPF

SEQ ID NO: 1025 - protein, 16 aa, Artificial Sequence
  source: /note="Description of Artificial Sequence: Synthetic peptide"
  source: /note="N-term MeS-Propionyl"
  MOD_RES (2)..(3): hArg
  MOD_RES (5)..(5): hArg
  MOD_RES (7)..(7): hArg
  MOD_RES (8)..(8): Cha
  MOD_RES (9)..(9): Chg
  MOD_RES (13)..(13): Oic
  MOD_RES (14)..(14): Nle
  MOD_RES (16)..(16): 4-Cl-F
FRRQRPRAGHKGXLPF

SEQ ID NO: 1026 - protein, 16 aa, Artificial Sequence
  source: /note="Description of Artificial Sequence: Synthetic peptide"
  source: /note="N-term MeS-Propionyl"
  MOD_RES (2)..(3): hArg
  MOD_RES (5)..(5): hArg
  MOD_RES (7)..(7): hArg
  MOD_RES (8)..(9): Cha
  MOD_RES (13)..(13): Oic
  MOD_RES (14)..(14): Nle
  MOD_RES (16)..(16): 4-Cl-F
FRRQRPRAAHKGXLPF

SEQ ID NO: 1027 - protein, 16 aa, Artificial Sequence
  source: /note="Description of Artificial Sequence: Synthetic peptide"
  source: /note="N-term MeS-Propionyl"
  MOD_RES (2)..(3): hArg
  MOD_RES (5)..(5): hArg
  MOD_RES (7)..(7): hArg
  MOD_RES (8)..(8): Cha
  MOD_RES (13)..(13): Oic
  MOD_RES (14)..(14): Nle
  MOD_RES (16)..(16): 4-Cl-F
FRRQRPRAHHKGXLPF

SEQ ID NO: 1028 - protein, 16 aa, Artificial Sequence
  source: /note="Description of Artificial Sequence: Synthetic peptide"
  source: /note="N-term MeS-Propionyl"
  MOD_RES (2)..(3): hArg
  MOD_RES (5)..(5): hArg
  MOD_RES (7)..(7): hArg
  MOD_RES (8)..(8): Cha
  MOD_RES (13)..(13): Oic
  MOD_RES (14)..(14): Nle
  MOD_RES (16)..(16): 4-Cl-F
FRRQRPRAYHKGXLPF

SEQ ID NO: 1029 - protein, 16 aa, Artificial Sequence
  source: /note="Description of Artificial Sequence: Synthetic peptide"
  source: /note="N-term MeS-Propionyl"
  MOD_RES (2)..(3): hArg
  MOD_RES (5)..(5): hArg
  MOD_RES (7)..(7): hArg
  MOD_RES (8)..(8): Cha
  MOD_RES (13)..(13): Oic
  MOD_RES (14)..(14): Nle
  MOD_RES (16)..(16): 4-Cl-F
FRRQRPRAWHKGXLPF

SEQ ID NO: 1030 - protein, 16 aa, Artificial Sequence
  source: /note="Description of Artificial Sequence: Synthetic peptide"
  source: /note="N-term MeS-Propionyl"
  MOD_RES (2)..(3): hArg
  MOD_RES (5)..(5): hArg
  MOD_RES (7)..(7): hArg
  MOD_RES (8)..(8): Cha
  MOD_RES (13)..(13): Oic
  MOD_RES (14)..(14): Nle
  MOD_RES (16)..(16): 4-Cl-F
FRRQRPRAFHKGXLPF

SEQ ID NO: 1031 - protein, 16 aa, Artificial Sequence
  source: /note="Description of Artificial Sequence: Synthetic peptide"
  source: /note="N-term MeS-Propionyl"
  MOD_RES (2)..(3): hArg
  MOD_RES (5)..(5): hArg
  MOD_RES (7)..(7): hArg
  MOD_RES (8)..(8): Cha
  MOD_RES (9)..(9): NMePhe
  MOD_RES (13)..(13): Oic
  MOD_RES (14)..(14): Nle
  MOD_RES (16)..(16): 4-Cl-F
FRRQRPRAFHKGXLPF

SEQ ID NO: 1032 - protein, 16 aa, Artificial Sequence
  source: /note="Description of Artificial Sequence: Synthetic peptide"
  source: /note="N-term MeS-Propionyl"
  MOD_RES (2)..(3): hArg
  MOD_RES (5)..(5): hArg
  MOD_RES (7)..(7): hArg
  MOD_RES (8)..(8): Cha
  MOD_RES (9)..(9): 1-Nal
  MOD_RES (13)..(13): Oic
  MOD_RES (14)..(14): Nle
  MOD_RES (16)..(16): 4-Cl-F
FRRQRPRAAHKGXLPF

SEQ ID NO: 1033 - protein, 16 aa, Artificial Sequence
  source: /note="Description of Artificial Sequence: Synthetic peptide"
  source: /note="N-term MeS-Propionyl"
  MOD_RES (2)..(3): hArg
  MOD_RES (5)..(5): hArg
  MOD_RES (7)..(7): hArg
  MOD_RES (8)..(8): Cha
  MOD_RES (9)..(9): 2-Nal
  MOD_RES (13)..(13): Oic
  MOD_RES (14)..(14): Nle
  MOD_RES (16)..(16): 4-Cl-F
FRRQRPRAAHKGXLPF

SEQ ID NO: 1034 - protein, 16 aa, Artificial Sequence
  source: /note="Description of Artificial Sequence: Synthetic peptide"
  source: /note="N-term MeS-Propionyl"
  MOD_RES (2)..(3): hArg
  MOD_RES (5)..(5): hArg
  MOD_RES (7)..(7): hArg
  MOD_RES (8)..(8): Cha
  MOD_RES (9)..(9): Bip
  MOD_RES (13)..(13): Oic
  MOD_RES (14)..(14): Nle
  MOD_RES (16)..(16): 4-Cl-F
FRRQRPRAFHKGXLPF

SEQ ID NO: 1035 - protein, 16 aa, Artificial Sequence
  source: /note="Description of Artificial Sequence: Synthetic peptide"
  source: /note="N-term MeS-Propionyl"
  MOD_RES (2)..(3): hArg
  MOD_RES (5)..(5): hArg
  MOD_RES (7)..(7): hArg
  MOD_RES (8)..(8): Cha
  MOD_RES (9)..(9): Igl
  MOD_RES (13)..(13): Oic
  MOD_RES (14)..(14): Nle
  MOD_RES (16)..(16): 4-Cl-F
FRRQRPRAGHKGXLPF

SEQ ID NO: 1036 - protein, 16 aa, Artificial Sequence
  source: /note="Description of Artificial Sequence: Synthetic peptide"
  source: /note="N-term MeS-Propionyl"
  MOD_RES (2)..(3): hArg
  MOD_RES (5)..(5): hArg
  MOD_RES (7)..(7): hArg
  MOD_RES (8)..(8): Cha
  MOD_RES (9)..(9): 4-Cl-F
  MOD_RES (13)..(13): Oic
  MOD_RES (14)..(14): Nle
  MOD_RES (16)..(16): 4-Cl-F
FRRQRPRAFHKGXLPF

SEQ ID NO: 1037 - protein, 16 aa, Artificial Sequence
  source: /note="Description of Artificial Sequence: Synthetic peptide"
  source: /note="N-term MeS-Propionyl"
  MOD_RES (2)..(3): hArg
  MOD_RES (5)..(5): hArg
  MOD_RES (7)..(7): hArg
  MOD_RES (8)..(8): Cha
  MOD_RES (9)..(9): 4-F-F
  MOD_RES (13)..(13): Oic
  MOD_RES (14)..(14): Nle
  MOD_RES (16)..(16): 4-Cl-F
FRRQRPRAFHKGXLPF

SEQ ID NO: 1038 - protein, 16 aa, Artificial Sequence
  source: /note="Description of Artificial Sequence: Synthetic peptide"
  source: /note="N-term MeS-Propionyl"
  MOD_RES (2)..(3): hArg
  MOD_RES (5)..(5): hArg
  MOD_RES (7)..(7): hArg
  MOD_RES (8)..(8): Cha
  MOD_RES (9)..(9): pI-Phe
  MOD_RES (13)..(13): Oic
  MOD_RES (14)..(14): Nle
  MOD_RES (16)..(16): 4-Cl-F
FRRQRPRAFHKGXLPF

SEQ ID NO: 1039 - protein, 16 aa, Artificial Sequence
  source: /note="Description of Artificial Sequence: Synthetic peptide"
  source: /note="N-term MeS-Propionyl"
  MOD_RES (2)..(3): hArg
  MOD_RES (5)..(5): hArg
  MOD_RES (7)..(7): hArg
  MOD_RES (8)..(8): Cha
  MOD_RES (9)..(9): 2Pal
  MOD_RES (13)..(13): Oic
  MOD_RES (14)..(14): Nle
  MOD_RES (16)..(16): 4-Cl-F
FRRQRPRAAHKGXLPF

SEQ ID NO: 1040 - protein, 16 aa, Artificial Sequence
  source: /note="Description of Artificial Sequence: Synthetic peptide"
  source: /note="N-term MeS-Propionyl"
  MOD_RES (2)..(3): hArg
  MOD_RES (5)..(5): hArg
  MOD_RES (7)..(7): hArg
  MOD_RES (8)..(8): Cha
  MOD_RES (9)..(9): 3Pal
  MOD_RES (13)..(13): Oic
  MOD_RES (14)..(14): Nle
  MOD_RES (16)..(16): 4-Cl-F
FRRQRPRAAHKGXLPF

SEQ ID NO: 1041 - protein, 16 aa, Artificial Sequence
  source: /note="Description of Artificial Sequence: Synthetic peptide"
  source: /note="N-term MeS-Propionyl"
  MOD_RES (2)..(3): hArg
  MOD_RES (5)..(5): hArg
  MOD_RES (7)..(7): hArg
  MOD_RES (8)..(8): Cha
  MOD_RES (9)..(9): Tic
  MOD_RES (13)..(13): Oic
  MOD_RES (14)..(14): Nle
  MOD_RES (16)..(16): 4-Cl-F
FRRQRPRAXHKGXLPF

SEQ ID NO: 1042 - protein, 16 aa, Artificial Sequence
  source: /note="Description of Artificial Sequence: Synthetic peptide"
  source: /note="N-term MeS-Propionyl"
  MOD_RES (2)..(3): hArg
  MOD_RES (5)..(5): hArg
  MOD_RES (7)..(7): hArg
  MOD_RES (8)..(8): Cha
  MOD_RES (9)..(9): Orn
  MOD_RES (13)..(13): Oic
  MOD_RES (14)..(14): Nle
  MOD_RES (16)..(16): 4-Cl-F
FRRQRPRAXHKGXLPF

SEQ ID NO: 1043 - protein, 16 aa, Artificial Sequence
  source: /note="Description of Artificial Sequence: Synthetic peptide"
  source: /note="N-term MeS-Propionyl"
  MOD_RES (2)..(3): hArg
  MOD_RES (5)..(5): hArg
  MOD_RES (7)..(7): hArg
  MOD_RES (8)..(8): Cha
  MOD_RES (9)..(9): Dab
  MOD_RES (13)..(13): Oic
  MOD_RES (14)..(14): Nle
  MOD_RES (16)..(16): 4-Cl-F
FRRQRPRAXHKGXLPF

SEQ ID NO: 1044 - protein, 16 aa, Artificial Sequence
  source: /note="Description of Artificial Sequence: Synthetic peptide"
  source: /note="N-term MeS-Propionyl"
  MOD_RES (2)..(3): hArg
  MOD_RES (5)..(5): hArg
  MOD_RES (7)..(7): hArg
  MOD_RES (8)..(8): Cha
  MOD_RES (9)..(9): Dap
  MOD_RES (13)..(13): Oic
  MOD_RES (14)..(14): Nle
  MOD_RES (16)..(16): 4-Cl-F
FRRQRPRAXHKGXLPF

SEQ ID NO: 1045 - protein, 16 aa, Artificial Sequence
  source: /note="Description of Artificial Sequence: Synthetic peptide"
  source: /note="N-term MeS-Propionyl"
  MOD_RES (2)..(3): hArg
  MOD_RES (5)..(5): hArg
  MOD_RES (7)..(7): hArg
  MOD_RES (8)..(8): Cha
  MOD_RES (13)..(13): Oic
  MOD_RES (14)..(14): Nle
  MOD_RES (16)..(16): 4-Cl-F
FRRQRPRASTKGXLPF

SEQ ID NO: 1046 - protein, 16 aa, Artificial Sequence
  source: /note="Description of Artificial Sequence: Synthetic peptide"
  source: /note="N-term MeS-Propionyl"
  MOD_RES (2)..(3): hArg
  MOD_RES (5)..(5): hArg
  MOD_RES (7)..(7): hArg
  MOD_RES (8)..(8): Cha
  MOD_RES (13)..(13): Oic
  MOD_RES (14)..(14): Nle
  MOD_RES (16)..(16): 4-Cl-F
FRRQRPRASAKGXLPF

SEQ ID NO: 1047 - protein, 16 aa, Artificial Sequence
  source: /note="Description of Artificial Sequence: Synthetic peptide"
  source: /note="N-term MeS-Propionyl"
  MOD_RES (2)..(3): hArg
  MOD_RES (5)..(5): hArg
  MOD_RES (7)..(7): hArg
  MOD_RES (8)..(8): Cha
  MOD_RES (10)..(10): Abu
  MOD_RES (13)..(13): Oic
  MOD_RES (14)..(14): Nle
  MOD_RES (16)..(16): 4-Cl-F
FRRQRPRASXKGXLPF

SEQ ID NO: 1048 - protein, 16 aa, Artificial Sequence
  source: /note="Description of Artificial Sequence: Synthetic peptide"
  source: /note="N-term MeS-Propionyl"
  MOD_RES (2)..(3): hArg
  MOD_RES (5)..(5): hArg
  MOD_RES (7)..(7): hArg
  MOD_RES (8)..(8): Cha
  MOD_RES (10)..(10): Nle
  MOD_RES (13)..(13): Oic
  MOD_RES (14)..(14): Nle
  MOD_RES (16)..(16): 4-Cl-F
FRRQRPRASLKGXLPF

SEQ ID NO: 1049 - protein, 16 aa, Artificial Sequence
  source: /note="Description of Artificial Sequence: Synthetic peptide"
  source: /note="N-term MeS-Propionyl"
  MOD_RES (2)..(3): hArg
  MOD_RES (5)..(5): hArg
  MOD_RES (7)..(7): hArg
  MOD_RES (8)..(8): Cha
  MOD_RES (10)..(10): Nva
  MOD_RES (13)..(13): Oic
  MOD_RES (14)..(14): Nle
  MOD_RES (16)..(16): 4-Cl-F
FRRQRPRASVKGXLPF

SEQ ID NO: 1050 - protein, 16 aa, Artificial Sequence
  source: /note="Description of Artificial Sequence: Synthetic peptide"
  source: /note="N-term MeS-Propionyl"
  MOD_RES (2)..(3): hArg
  MOD_RES (5)..(5): hArg
  MOD_RES (7)..(7): hArg
  MOD_RES (8)..(8): Cha
  MOD_RES (13)..(13): Oic
  MOD_RES (14)..(14): Nle
  MOD_RES (16)..(16): 4-Cl-F
FRRQRPRASVKGXLPF

SEQ ID NO: 1051 - protein, 16 aa, Artificial Sequence
  source: /note="Description of Artificial Sequence: Synthetic peptide"
  source: /note="N-term MeS-Propionyl"
  MOD_RES (2)..(3): hArg
  MOD_RES (5)..(5): hArg
  MOD_RES (7)..(7): hArg
  MOD_RES (8)..(8): Cha
  MOD_RES (13)..(13): Oic
  MOD_RES (14)..(14): Nle
  MOD_RES (16)..(16): 4-Cl-F
FRRQRPRASGKGXLPF

SEQ ID NO: 1052 - protein, 16 aa, Artificial Sequence
  source: /note="Description of Artificial Sequence: Synthetic peptide"
  source: /note="N-term MeS-Propionyl"
  MOD_RES (2)..(3): hArg
  MOD_RES (5)..(5): hArg
  MOD_RES (7)..(7): hArg
  MOD_RES (8)..(8): Cha
  MOD_RES (13)..(13): Oic
  MOD_RES (14)..(14): Nle
  MOD_RES (16)..(16): 4-Cl-F
FRRQRPRASLKGXLPF

SEQ ID NO: 1053 - protein, 16 aa, Artificial Sequence
  source: /note="Description of Artificial Sequence: Synthetic peptide"
  source: /note="N-term MeS-Propionyl"
  MOD_RES (2)..(3): hArg
  MOD_RES (5)..(5): hArg
  MOD_RES (7)..(7): hArg
  MOD_RES (8)..(8): Cha
  MOD_RES (13)..(13): Oic
  MOD_RES (14)..(14): Nle
  MOD_RES (16)..(16): 4-Cl-F
FRRQRPRASIKGXLPF

SEQ ID NO: 1054 - protein, 16 aa, Artificial Sequence
  source: /note="Description of Artificial Sequence: Synthetic peptide"
  source: /note="N-term MeS-Propionyl"
  MOD_RES (2)..(3): hArg
  MOD_RES (5)..(5): hArg
  MOD_RES (7)..(7): hArg
  MOD_RES (8)..(8): Cha
  MOD_RES (10)..(10): CPG
  MOD_RES (13)..(13): Oic
  MOD_RES (14)..(14): Nle
  MOD_RES (16)..(16): 4-Cl-F
FRRQRPRASGKGXLPF

SEQ ID NO: 1055 - protein, 16 aa, Artificial Sequence
  source: /note="Description of Artificial Sequence: Synthetic peptide"
  source: /note="N-term MeS-Propionyl"
  MOD_RES (2)..(3): hArg
  MOD_RES (5)..(5): hArg
  MOD_RES (7)..(7): hArg
  MOD_RES (8)..(8): Cha
  MOD_RES (10)..(10): Chg
  MOD_RES (13)..(13): Oic
  MOD_RES (14)..(14): Nle
  MOD_RES (16)..(16): 4-Cl-F
FRRQRPRASGKGXLPF

SEQ ID NO: 1056 - protein, 16 aa, Artificial Sequence
  source: /note="Description of Artificial Sequence: Synthetic peptide"
  source: /note="N-term MeS-Propionyl"
  MOD_RES (2)..(3): hArg
  MOD_RES (5)..(5): hArg
  MOD_RES (7)..(7): hArg
  MOD_RES (8)..(8): Cha
  MOD_RES (10)..(10): Cha
  MOD_RES (13)..(13): Oic
  MOD_RES (14)..(14): Nle
  MOD_RES (16)..(16): 4-Cl-F
FRRQRPRASAKGXLPF

SEQ ID NO: 1057 - protein, 16 aa, Artificial Sequence
  source: /note="Description of Artificial Sequence: Synthetic peptide"
  source: /note="N-term MeS-Propionyl"
  MOD_RES (2)..(3): hArg
  MOD_RES (5)..(5): hArg
  MOD_RES (7)..(7): hArg
  MOD_RES (8)..(8): Cha
  MOD_RES (13)..(13): Oic
  MOD_RES (14)..(14): Nle
  MOD_RES (16)..(16): 4-Cl-F
FRRQRPRASHKGXLPF

SEQ ID NO: 1058 - protein, 16 aa, Artificial Sequence
  source: /note="Description of Artificial Sequence: Synthetic peptide"
  source: /note="N-term MeS-Propionyl"
  MOD_RES (2)..(3): hArg
  MOD_RES (5)..(5): hArg
  MOD_RES (7)..(7): hArg
  MOD_RES (8)..(8): Cha
  MOD_RES (13)..(13): Oic
  MOD_RES (14)..(14): Nle
  MOD_RES (16)..(16): 4-Cl-F
FRRQRPRASYKGXLPF

SEQ ID NO: 1059 - protein, 16 aa, Artificial Sequence
  source: /note="Description of Artificial Sequence: Synthetic peptide"
  source: /note="N-term MeS-Propionyl"
  MOD_RES (2)..(3): hArg
  MOD_RES (5)..(5): hArg
  MOD_RES (7)..(7): hArg
  MOD_RES (8)..(8): Cha
  MOD_RES (13)..(13): Oic
  MOD_RES (14)..(14): Nle
  MOD_RES (16)..(16): 4-Cl-F
FRRQRPRASWKGXLPF

SEQ ID NO: 1060 - protein, 16 aa, Artificial Sequence
  source: /note="Description of Artificial Sequence: Synthetic peptide"
  source: /note="N-term MeS-Propionyl"
  MOD_RES (2)..(3): hArg
  MOD_RES (5)..(5): hArg
  MOD_RES (7)..(7): hArg
  MOD_RES (8)..(8): Cha
  MOD_RES (13)..(13): Oic
  MOD_RES (14)..(14): Nle
  MOD_RES (16)..(16): 4-Cl-F
FRRQRPRASFKGXLPF

SEQ ID NO: 1061 - protein, 16 aa, Artificial Sequence
  source: /note="Description of Artificial Sequence: Synthetic peptide"
  source: /note="N-term MeS-Propionyl"
  MOD_RES (2)..(3): hArg
  MOD_RES (5)..(5): hArg
  MOD_RES (7)..(7): hArg
  MOD_RES (8)..(8): Cha
  MOD_RES (10)..(10): NMePhe
  MOD_RES (13)..(13): Oic
  MOD_RES (14)..(14): Nle
  MOD_RES (16)..(16): 4-Cl-F
FRRQRPRASFKGXLPF

SEQ ID NO: 1062 - protein, 16 aa, Artificial Sequence
  source: /note="Description of Artificial Sequence: Synthetic peptide"
  source: /note="N-term MeS-Propionyl"
  MOD_RES (2)..(3): hArg
  MOD_RES (5)..(5): hArg
  MOD_RES (7)..(7): hArg
  MOD_RES (8)..(8): Cha
  MOD_RES (10)..(10): 1-Nal
  MOD_RES (13)..(13): Oic
  MOD_RES (14)..(14): Nle
  MOD_RES (16)..(16): 4-Cl-F
FRRQRPRASAKGXLPF

SEQ ID NO: 1063 - protein, 16 aa, Artificial Sequence
  source: /note="Description of Artificial Sequence: Synthetic peptide"
  source: /note="N-term MeS-Propionyl"
  MOD_RES (2)..(3): hArg
  MOD_RES (5)..(5): hArg
  MOD_RES (7)..(7): hArg
  MOD_RES (8)..(8): Cha
  MOD_RES (10)..(10): 2-Nal
  MOD_RES (13)..(13): Oic
  MOD_RES (14)..(14): Nle
  MOD_RES (16)..(16): 4-Cl-F
FRRQRPRASAKGXLPF

SEQ ID NO: 1064 - protein, 16 aa, Artificial Sequence
  source: /note="Description of Artificial Sequence: Synthetic peptide"
  source: /note="N-term MeS-Propionyl"
  MOD_RES (2)..(3): hArg
  MOD_RES (5)..(5): hArg
  MOD_RES (7)..(7): hArg
  MOD_RES (8)..(8): Cha
  MOD_RES (10)..(10): Bip
  MOD_RES (13)..(13): Oic
  MOD_RES (14)..(14): Nle
  MOD_RES (16)..(16): 4-Cl-F
FRRQRPRASFKGXLPF

SEQ ID NO: 1065 - protein, 16 aa, Artificial Sequence
  source: /note="Description of Artificial Sequence: Synthetic peptide"
  source: /note="N-term MeS-Propionyl"
  MOD_RES (2)..(3): hArg
  MOD_RES (5)..(5): hArg
  MOD_RES (7)..(7): hArg
  MOD_RES (8)..(8): Cha
  MOD_RES (10)..(10): Igl
  MOD_RES (13)..(13): Oic
  MOD_RES (14)..(14): Nle
  MOD_RES (16)..(16): 4-Cl-F
FRRQRPRASGKGXLPF

SEQ ID NO: 1066 - protein, 16 aa, Artificial Sequence
  source: /note="Description of Artificial Sequence: Synthetic peptide"
  source: /note="N-term MeS-Propionyl"
  MOD_RES (2)..(3): hArg
  MOD_RES (5)..(5): hArg
  MOD_RES (7)..(7): hArg
  MOD_RES (8)..(8): Cha
  MOD_RES (10)..(10): 4-Cl-F
  MOD_RES (13)..(13): Oic
  MOD_RES (14)..(14): Nle
  MOD_RES (16)..(16): 4-Cl-F
FRRQRPRASFKGXLPF

SEQ ID NO: 1067 - protein, 16 aa, Artificial Sequence
  source: /note="Description of Artificial Sequence: Synthetic peptide"
  source: /note="N-term MeS-Propionyl"
  MOD_RES (2)..(3): hArg
  MOD_RES (5)..(5): hArg
  MOD_RES (7)..(7): hArg
  MOD_RES (8)..(8): Cha
  MOD_RES (10)..(10): 4-F-F
  MOD_RES (13)..(13): Oic
  MOD_RES (14)..(14): Nle
  MOD_RES (16)..(16): 4-Cl-F
FRRQRPRASFKGXLPF

SEQ ID NO: 1068 - protein, 16 aa, Artificial Sequence
  source: /note="Description of Artificial Sequence: Synthetic peptide"
  source: /note="N-term MeS-Propionyl"
  MOD_RES (2)..(3): hArg
  MOD_RES (5)..(5): hArg
  MOD_RES (7)..(7): hArg
  MOD_RES (8)..(8): Cha
  MOD_RES (10)..(10): 4-I-F
  MOD_RES (13)..(13): Oic
  MOD_RES (14)..(14): Nle
  MOD_RES (16)..(16): 4-Cl-F
FRRQRPRASFKGXLPF

SEQ ID NO: 1069 - protein, 16 aa, Artificial Sequence
  source: /note="Description of Artificial Sequence: Synthetic peptide"
  source: /note="N-term MeS-Propionyl"
  MOD_RES (2)..(3): hArg
  MOD_RES (5)..(5): hArg
  MOD_RES (7)..(7): hArg
  MOD_RES (8)..(8): Cha
  MOD_RES (10)..(10): 2Pal
  MOD_RES (13)..(13): Oic
  MOD_RES (14)..(14): Nle
  MOD_RES (16)..(16): 4-Cl-F
FRRQRPRASAKGXLPF

SEQ ID NO: 1070 - protein, 16 aa, Artificial Sequence
  source: /note="Description of Artificial Sequence: Synthetic peptide"
  source: /note="N-term MeS-Propionyl"
  MOD_RES (2)..(3): hArg
  MOD_RES (5)..(5): hArg
  MOD_RES (7)..(7): hArg
  MOD_RES (8)..(8): Cha
  MOD_RES (10)..(10): 3Pal
  MOD_RES (13)..(13): Oic
  MOD_RES (14)..(14): Nle
  MOD_RES (16)..(16): 4-Cl-F
FRRQRPRASAKGXLPF

SEQ ID NO: 1071 - protein, 16 aa, Artificial Sequence
  source: /note="Description of Artificial Sequence: Synthetic peptide"
  source: /note="N-term MeS-Propionyl"
  MOD_RES (2)..(3): hArg
  MOD_RES (5)..(5): hArg
  MOD_RES (7)..(7): hArg
  MOD_RES (8)..(8): Cha
  MOD_RES (10)..(10): Tic
  MOD_RES (13)..(13): Oic
  MOD_RES (14)..(14): Nle
  MOD_RES (16)..(16): 4-Cl-F
FRRQRPRASXKGXLPF

SEQ ID NO: 1072 - protein, 16 aa, Artificial Sequence
  source: /note="Description of Artificial Sequence: Synthetic peptide"
  source: /note="N-term MeS-Propionyl"
  MOD_RES (2)..(3): hArg
  MOD_RES (5)..(5): hArg
  MOD_RES (7)..(7): hArg
  MOD_RES (8)..(8): Cha
  MOD_RES (10)..(10): Orn
  MOD_RES (13)..(13): Oic
  MOD_RES (14)..(14): Nle
  MOD_RES (16)..(16): 4-Cl-F
FRRQRPRASXKGXLPF

SEQ ID NO: 1073 - protein, 16 aa, Artificial Sequence
  source: /note="Description of Artificial Sequence: Synthetic peptide"
  source: /note="N-term MeS-Propionyl"
  MOD_RES (2)..(3): hArg
  MOD_RES (5)..(5): hArg
  MOD_RES (7)..(7): hArg
  MOD_RES (8)..(8): Cha
  MOD_RES (10)..(10): Dab
  MOD_RES (13)..(13): Oic
  MOD_RES (14)..(14): Nle
  MOD_RES (16)..(16): 4-Cl-F
FRRQRPRASXKGXLPF

SEQ ID NO: 1074 - protein, 16 aa, Artificial Sequence
  source: /note="Description of Artificial Sequence: Synthetic peptide"
  source: /note="N-term MeS-Propionyl"
  MOD_RES (2)..(3): hArg
  MOD_RES (5)..(5): hArg
  MOD_RES (7)..(7): hArg
  MOD_RES (8)..(8): Cha
  MOD_RES (10)..(10): Dap
  MOD_RES (13)..(13): Oic
  MOD_RES (14)..(14): Nle
  MOD_RES (16)..(16): 4-Cl-F
FRRQRPRASXKGXLPF

SEQ ID NO: 1075 - protein, 13 aa, Artificial Sequence
  source: /note="Description of Artificial Sequence: Synthetic peptide"
  MOD_RES (1)..(1): PyroGlu
  MOD_RES (12)..(12): 1-Nal
ERPRLFHKGPMAF

SEQ ID NO: 1076 - protein, 16 aa, Artificial Sequence
  source: /note="Description of Artificial Sequence: Synthetic peptide"
  source: /note="N-term MeS-Propionyl"
  MOD_RES (2)..(3): hArg
  MOD_RES (5)..(5): hArg
  MOD_RES (7)..(7): hArg
  MOD_RES (8)..(8): Cha
  MOD_RES (11)..(11): Nle
  MOD_RES (13)..(13): Oic
  MOD_RES (14)..(14): Nle
  MOD_RES (16)..(16): 4-Cl-F
FRRQRPRASHLGXLPF

SEQ ID NO: 1077 - protein, 16 aa, Artificial Sequence
  source: /note="Description of Artificial Sequence: Synthetic peptide"
  source: /note="N-term MeS-Propionyl"
  MOD_RES (2)..(3): hArg
  MOD_RES (5)..(5): hArg
  MOD_RES (7)..(7): hArg
  MOD_RES (8)..(8): Cha
  MOD_RES (11)..(11): Nva
  MOD_RES (13)..(13): Oic
  MOD_RES (14)..(14): Nle
  MOD_RES (16)..(16): 4-Cl-F
FRRQRPRASHVGXLPF

SEQ ID NO: 1078 - protein, 16 aa, Artificial Sequence
  source: /note="Description of Artificial Sequence: Synthetic peptide"
  source: /note="N-term MeS-Propionyl"
  MOD_RES (2)..(3): hArg
  MOD_RES (5)..(5): hArg
  MOD_RES (7)..(7): hArg
  MOD_RES (8)..(8): Cha
  MOD_RES (13)..(13): Oic
  MOD_RES (14)..(14): Nle
  MOD_RES (16)..(16): 4-Cl-F
FRRQRPRASHVGXLPF

SEQ ID NO: 1079 - protein, 16 aa, Artificial Sequence
  source: /note="Description of Artificial Sequence: Synthetic peptide"
  source: /note="N-term MeS-Propionyl"
  MOD_RES (2)..(3): hArg
  MOD_RES (5)..(5): hArg
  MOD_RES (7)..(7): hArg
  MOD_RES (8)..(8): Cha
  MOD_RES (13)..(13): Oic
  MOD_RES (14)..(14): Nle
  MOD_RES (16)..(16): 4-Cl-F
FRRQRPRASHGGXLPF

SEQ ID NO: 1080 - protein, 16 aa, Artificial Sequence
  source: /note="Description of Artificial Sequence: Synthetic peptide"
  source: /note="N-term MeS-Propionyl"
  MOD_RES (2)..(3): hArg
  MOD_RES (5)..(5): hArg
  MOD_RES (7)..(7): hArg
  MOD_RES (8)..(8): Cha
  MOD_RES (11)..(11): CPG
  MOD_RES (13)..(13): Oic
  MOD_RES (14)..(14): Nle
  MOD_RES (16)..(16): 4-Cl-F
FRRQRPRASHGGXLPF

SEQ ID NO: 1081 - protein, 16 aa, Artificial Sequence
  source: /note="Description of Artificial Sequence: Synthetic peptide"
  source: /note="N-term MeS-Propionyl"
  MOD_RES (2)..(3): hArg
  MOD_RES (5)..(5): hArg
  MOD_RES (7)..(7): hArg
  MOD_RES (8)..(8): Cha
  MOD_RES (11)..(11): Chg
  MOD_RES (13)..(13): Oic
  MOD_RES (14)..(14): Nle
  MOD_RES (16)..(16): 4-Cl-F
FRRQRPRASHGGXLPF

SEQ ID NO: 1082 - protein, 16 aa, Artificial Sequence
  source: /note="Description of Artificial Sequence: Synthetic peptide"
  source: /note="N-term MeS-Propionyl"
  MOD_RES (2)..(3): hArg
  MOD_RES (5)..(5): hArg
  MOD_RES (7)..(7): hArg
  MOD_RES (8)..(8): Cha
  MOD_RES (11)..(11): Cha
  MOD_RES (13)..(13): Oic
  MOD_RES (14)..(14): Nle
  MOD_RES (16)..(16): 4-Cl-F
FRRQRPRASHAGXLPF

SEQ ID NO: 1083 - protein, 16 aa, Artificial Sequence
  source: /note="Description of Artificial Sequence: Synthetic peptide"
  source: /note="N-term MeS-Propionyl"
  MOD_RES (2)..(3): hArg
  MOD_RES (5)..(5): hArg
  MOD_RES (7)..(7): hArg
  MOD_RES (8)..(8): Cha
  MOD_RES (13)..(13): Oic
  MOD_RES (14)..(14): Nle
  MOD_RES (16)..(16): 4-Cl-F
FRRQRPRASHWGXLPF

SEQ ID NO: 1084 - protein, 16 aa, Artificial Sequence
  source: /note="Description of Artificial Sequence: Synthetic peptide"
  source: /note="N-term MeS-Propionyl"
  MOD_RES (2)..(3): hArg
  MOD_RES (5)..(5): hArg
  MOD_RES (7)..(7): hArg
  MOD_RES (8)..(8): Cha
  MOD_RES (11)..(11): 1-Nal
  MOD_RES (13)..(13): Oic
  MOD_RES (14)..(14): Nle
  MOD_RES (16)..(16): 4-Cl-F
FRRQRPRASHAGXLPF

SEQ ID NO: 1085 - protein, 16 aa, Artificial Sequence
  source: /note="Description of Artificial Sequence: Synthetic peptide"
  source: /note="N-term MeS-Propionyl"
  MOD_RES (2)..(3): hArg
  MOD_RES (5)..(5): hArg
  MOD_RES (7)..(7): hArg
  MOD_RES (8)..(8): Cha
  MOD_RES (11)..(11): 2-Nal
  MOD_RES (13)..(13): Oic
  MOD_RES (14)..(14): Nle
  MOD_RES (16)..(16): 4-Cl-F
FRRQRPRASHAGXLPF

SEQ ID NO: 1086 - protein, 16 aa, Artificial Sequence
  source: /note="Description of Artificial Sequence: Synthetic peptide"
  source: /note="N-term MeS-Propionyl"
  MOD_RES (2)..(3): hArg
  MOD_RES (5)..(5): hArg
  MOD_RES (7)..(7): hArg
  MOD_RES (8)..(8): Cha
  MOD_RES (11)..(11): Bip
  MOD_RES (13)..(13): Oic
  MOD_RES (14)..(14): Nle
  MOD_RES (16)..(16): 4-Cl-F
FRRQRPRASHFGXLPF

SEQ ID NO: 1087 - protein, 16 aa, Artificial Sequence
  source: /note="Description of Artificial Sequence: Synthetic peptide"
  source: /note="N-term MeS-Propionyl"
  MOD_RES (2)..(3): hArg
  MOD_RES (5)..(5): hArg
  MOD_RES (7)..(7): hArg
  MOD_RES (8)..(8): Cha
  MOD_RES (11)..(11): Igl
  MOD_RES (13)..(13): Oic
  MOD_RES (14)..(14): Nle
  MOD_RES (16)..(16): 4-Cl-F
FRRQRPRASHGGXLPF

SEQ ID NO: 1088 - protein, 16 aa, Artificial Sequence
  source: /note="Description of Artificial Sequence: Synthetic peptide"
  source: /note="N-term MeS-Propionyl"
  MOD_RES (2)..(3): hArg
  MOD_RES (5)..(5): hArg
  MOD_RES (7)..(7): hArg
  MOD_RES (8)..(8): Cha
  MOD_RES (11)..(11): 4-Cl-F
  MOD_RES (13)..(13): Oic
  MOD_RES (14)..(14): Nle
  MOD_RES (16)..(16): 4-Cl-F
FRRQRPRASHFGXLPF

SEQ ID NO: 1089 - protein, 16 aa, Artificial Sequence
  source: /note="Description of Artificial Sequence: Synthetic peptide"
  source: /note="N-term MeS-Propionyl"
  MOD_RES (2)..(3): hArg
  MOD_RES (5)..(5): hArg
  MOD_RES (7)..(7): hArg
  MOD_RES (8)..(8): Cha
  MOD_RES (11)..(11): 4-F-F
  MOD_RES (13)..(13): Oic
  MOD_RES (14)..(14): Nle
  MOD_RES (16)..(16): 4-Cl-F
FRRQRPRASHFGXLPF

SEQ ID NO: 1090 - protein, 16 aa, Artificial Sequence
  source: /note="Description of Artificial Sequence: Synthetic peptide"
  source: /note="N-term MeS-Propionyl"
  MOD_RES (2)..(3): hArg
  MOD_RES (5)..(5): hArg
  MOD_RES (7)..(7): hArg
  MOD_RES (8)..(8): Cha
  MOD_RES (11)..(11): pI-Phe
  MOD_RES (13)..(13): Oic
  MOD_RES (14)..(14): Nle
  MOD_RES (16)..(16): 4-Cl-F
FRRQRPRASHFGXLPF

SEQ ID NO: 1091 - protein, 16 aa, Artificial Sequence
  source: /note="Description of Artificial Sequence: Synthetic peptide"
  source: /note="N-term MeS-Propionyl"
  MOD_RES (2)..(3): hArg
  MOD_RES (5)..(5): hArg
  MOD_RES (7)..(7): hArg
  MOD_RES (8)..(8): Cha
  MOD_RES (11)..(11): 2Pal
  MOD_RES (13)..(13): Oic
  MOD_RES (14)..(14): Nle
  MOD_RES (16)..(16): 4-Cl-F
FRRQRPRASHAGXLPF

SEQ ID NO: 1092 - protein, 16 aa, Artificial Sequence
  source: /note="Description of Artificial Sequence: Synthetic peptide"
  source: /note="N-term MeS-Propionyl"
  MOD_RES (2)..(3): hArg
  MOD_RES (5)..(5): hArg
  MOD_RES (7)..(7): hArg
  MOD_RES (8)..(8): Cha
  MOD_RES (11)..(11): 3Pal
  MOD_RES (13)..(13): Oic
  MOD_RES (14)..(14): Nle
  MOD_RES (16)..(16): 4-Cl-F
FRRQRPRASHAGXLPF

SEQ ID NO: 1093 - protein, 16 aa, Artificial Sequence
  source: /note="Description of Artificial Sequence: Synthetic peptide"
  source: /note="N-term MeS-Propionyl"
  MOD_RES (2)..(3): hArg
  MOD_RES (5)..(5): hArg
  MOD_RES (7)..(7): hArg
  MOD_RES (8)..(8): Cha
  MOD_RES (11)..(11): Orn
  MOD_RES (13)..(13): Oic
  MOD_RES (14)..(14): Nle
  MOD_RES (16)..(16): 4-Cl-F
FRRQRPRASHXGXLPF

SEQ ID NO: 1094 - protein, 16 aa, Artificial Sequence
  source: /note="Description of Artificial Sequence: Synthetic peptide"
  source: /note="N-term MeS-Propionyl"
  MOD_RES (2)..(3): hArg
  MOD_RES (5)..(5): hArg
  MOD_RES (7)..(7): hArg
  MOD_RES (8)..(8): Cha
  MOD_RES (11)..(11): Dab
  MOD_RES (13)..(13): Oic
  MOD_RES (14)..(14): Nle
  MOD_RES (16)..(16): 4-Cl-F
FRRQRPRASHXGXLPF

SEQ ID NO: 1095 - protein, 16 aa, Artificial Sequence
  source: /note="Description of Artificial Sequence: Synthetic peptide"
  source: /note="N-term MeS-Propionyl"
  MOD_RES (2)..(3): hArg
  MOD_RES (5)..(5): hArg
  MOD_RES (7)..(7): hArg
  MOD_RES (8)..(8): Cha
  MOD_RES (11)..(11): Dap
  MOD_RES (13)..(13): Oic
  MOD_RES (14)..(14): Nle
  MOD_RES (16)..(16): 4-Cl-F
FRRQRPRASHXGXLPF

SEQ ID NO: 1096 - protein, 16 aa, Artificial Sequence
  source: /note="Description of Artificial Sequence: Synthetic peptide"
  source: /note="N-term Acetyl"
  MOD_RES (1)..(1): Atz(PEG10)
  MOD_RES (7)..(7): hArg
  MOD_RES (8)..(8): NMeLeu
  MOD_RES (14)..(14): Nle
  MOD_RES (16)..(16): 4-Cl-F
AGGLRPRLSHKGPLPF

SEQ ID NO: 1097 - protein, 15 aa, Artificial Sequence
  source: /note="Description of Artificial Sequence: Synthetic peptide"
  source: /note="N-term Acetyl"
  MOD_RES (1)..(1): Atz(PEG10)
  MOD_RES (6)..(6): hArg
  MOD_RES (7)..(7): NMeLeu
  MOD_RES (13)..(13): Nle
  MOD_RES (15)..(15): 4-Cl-F
AGLRPRLSHKGPLPF

SEQ ID NO: 1098 - protein, 14 aa, Artificial Sequence
  source: /note="Description of Artificial Sequence: Synthetic peptide"
  source: /note="N-term Acetyl"
  MOD_RES (1)..(1): Atz(PEG10)
  MOD_RES (5)..(5): hArg
  MOD_RES (6)..(6): NMeLeu
  MOD_RES (12)..(12): Nle
  MOD_RES (14)..(14): 4-Cl-F
ALRPRLSHKGPLPF

SEQ ID NO: 1099 - protein, 13 aa, Artificial Sequence
  source: /note="Description of Artificial Sequence: Synthetic peptide"
  MOD_RES (1)..(1): PyroGlu
  MOD_RES (2)..(2): Atz(PEG10)
  MOD_RES (4)..(4): hArg
  MOD_RES (5)..(5): NMeLeu
  MOD_RES (11)..(11): Nle
  MOD_RES (13)..(13): 4-Cl-F
EAPRLSHKGPLPF

SEQ ID NO: 1100 - protein, 13 aa, Artificial Sequence
  source: /note="Description of Artificial Sequence: Synthetic peptide"
  MOD_RES (1)..(1): PyroGlu
  MOD_RES (3)..(3): Atz(PEG10)
  MOD_RES (4)..(4): hArg
  MOD_RES (5)..(5): NMeLeu
  MOD_RES (11)..(11): Nle
  MOD_RES (13)..(13): 4-Cl-F
ERARLSHKGPLPF

SEQ ID NO: 1101 - protein, 13 aa, Artificial Sequence
  source: /note="Description of Artificial Sequence: Synthetic peptide"
  MOD_RES (1)..(1): PyroGlu
  MOD_RES (4)..(4): Atz(PEG10)
  MOD_RES (5)..(5): NMeLeu
  MOD_RES (11)..(11): Nle
  MOD_RES (13)..(13): 4-Cl-F
ERPALSHKGPLPF

SEQ ID NO: 1102 - protein, 13 aa, Artificial Sequence
  source: /note="Description of Artificial Sequence: Synthetic peptide"
  MOD_RES (1)..(1): PyroGlu
  MOD_RES (4)..(4): hArg
  MOD_RES (5)..(5): Atz(PEG10)
  MOD_RES (11)..(11): Nle
  MOD_RES (13)..(13): 4-Cl-F
ERPRASHKGPLPF

SEQ ID NO: 1103 - protein, 13 aa, Artificial Sequence
  source: /note="Description of Artificial Sequence: Synthetic peptide"
  MOD_RES (1)..(1): PyroGlu
  MOD_RES (4)..(4): hArg
  MOD_RES (5)..(5): NMeLeu
  MOD_RES (6)..(6): Atz(PEG10)
  MOD_RES (11)..(11): Nle
  MOD_RES (13)..(13): 4-Cl-F
ERPRLAHKGPLPF

SEQ ID NO: 1104 - protein, 13 aa, Artificial Sequence
  source: /note="Description of Artificial Sequence: Synthetic peptide"
  MOD_RES (1)..(1): PyroGlu
  MOD_RES (4)..(4): hArg
  MOD_RES (5)..(5): NMeLeu
  MOD_RES (7)..(7): Atz(PEG10)
  MOD_RES (11)..(11): Nle
  MOD_RES (13)..(13): 4-Cl-F
ERPRLSAKGPLPF

SEQ ID NO: 1105 - protein, 13 aa, Artificial Sequence
  source: /note="Description of Artificial Sequence: Synthetic peptide"
  MOD_RES (1)..(1): PyroGlu
  MOD_RES (4)..(4): hArg
  MOD_RES (5)..(5): NMeLeu
  MOD_RES (8)..(8): Atz(PEG10)
  MOD_RES (11)..(11): Nle
  MOD_RES (13)..(13): 4-Cl-F
ERPRLSHAGPLPF

SEQ ID NO: 1106 - protein, 13 aa, Artificial Sequence
  source: /note="Description of Artificial Sequence: Synthetic peptide"
  MOD_RES (1)..(1): PyroGlu
  MOD_RES (4)..(4): hArg
  MOD_RES (5)..(5): NMeLeu
  MOD_RES (9)..(9): Atz(PEG10)
  MOD_RES (11)..(11): Nle
  MOD_RES (13)..(13): 4-Cl-F
ERPRLSHKAPLPF

SEQ ID NO: 1107 - protein, 13 aa, Artificial Sequence
  source: /note="Description of Artificial Sequence: Synthetic peptide"
  MOD_RES (1)..(1): PyroGlu
  MOD_RES (4)..(4): hArg
  MOD_RES (5)..(5): NMeLeu
  MOD_RES (11)..(11): Atz(PEG10)
  MOD_RES (13)..(13): 4-Cl-F
ERPRLSHKGPAPF

SEQ ID NO: 1108 - protein, 13 aa, Artificial Sequence
  source: /note="Description of Artificial Sequence: Synthetic peptide"
  MOD_RES (1)..(1): PyroGlu
  MOD_RES (4)..(4): hArg
  MOD_RES (5)..(5): NMeLeu
  MOD_RES (11)..(11): Nle
  MOD_RES (12)..(12): Atz(PEG10)
  MOD_RES (13)..(13): 4-Cl-F
ERPRLSHKGPLAF

SEQ ID NO: 1109 - protein, 13 aa, Artificial Sequence
  source: /note="Description of Artificial Sequence: Synthetic peptide"
  MOD_RES (1)..(1): PyroGlu
  MOD_RES (4)..(4): hArg
  MOD_RES (5)..(5): NMeLeu
  MOD_RES (11)..(11): Nle
  MOD_RES (13)..(13): Atz(PEG10)
  source: /note="C-term Amide"
ERPRLSHKGPLPA

SEQ ID NO: 1110 - protein, 14 aa, Artificial Sequence
  source: /note="Description of Artificial Sequence: Synthetic peptide"
  MOD_RES (1)..(1): PyroGlu
  MOD_RES (4)..(4): hArg
  MOD_RES (5)..(5): NMeLeu
  MOD_RES (11)..(11): Nle
  MOD_RES (13)..(13): 4-Cl-F
  MOD_RES (14)..(14): Atz(PEG10)
  source: /note="C-term Amide"
ERPRLSHKGPLPFA

SEQ ID NO: 1111 - protein, 15 aa, Artificial Sequence
  source: /note="Description of Artificial Sequence: Synthetic peptide"
  MOD_RES (1)..(1): PyroGlu
  MOD_RES (4)..(4): hArg
  MOD_RES (5)..(5): NMeLeu
  MOD_RES (11)..(11): Nle
  MOD_RES (13)..(13): 4-Cl-F
  MOD_RES (15)..(15): Atz(PEG10)
  source: /note="C-term Amide"
ERPRLSHKGPLPFGA

SEQ ID NO: 1112 - protein, 16 aa, Artificial Sequence
  source: /note="Description of Artificial Sequence: Synthetic peptide"
  MOD_RES (1)..(1): PyroGlu
  MOD_RES (4)..(4): hArg
  MOD_RES (5)..(5): NMeLeu
  MOD_RES (11)..(11): Nle
  MOD_RES (13)..(13): 4-Cl-F
  MOD_RES (16)..(16): Atz(PEG10)
  source: /note="C-term Amide"
ERPRLSHKGPLPFGGA

SEQ ID NO: 1113 - protein, 15 aa, Artificial Sequence
  source: /note="Description of Artificial Sequence: Synthetic peptide"
  source: /note="N-term Acetyl"
  MOD_RES (1)..(1): Atz(PEG10)
  MOD_RES (7)..(7): hArg
  MOD_RES (8)..(8): Cha
  MOD_RES (14)..(14): Nle
  MOD_RES (15)..(15): D-Phe
AGGLRPRASHKGPLF

SEQ ID NO: 1114 - protein, 14 aa, Artificial Sequence
  source: /note="Description of Artificial Sequence: Synthetic peptide"
  source: /note="N-term Acetyl"
  MOD_RES (1)..(1): Atz(PEG10)
  MOD_RES (6)..(6): hArg
  MOD_RES (7)..(7): Cha
  MOD_RES (13)..(13): Nle
  MOD_RES (14)..(14): D-Phe
AGLRPRASHKGPLF

SEQ ID NO: 1115 - protein, 13 aa, Artificial Sequence
  source: /note="Description of Artificial Sequence: Synthetic peptide"
  source: /note="N-term Acetyl"
  MOD_RES (1)..(1): Atz(PEG10)
  MOD_RES (5)..(5): hArg
  MOD_RES (6)..(6): Cha
  MOD_RES (12)..(12): Nle
  MOD_RES (13)..(13): D-Phe
ALRPRASHKGPLF

SEQ ID NO: 1116 - protein, 12 aa, Artificial Sequence
  source: /note="Description of Artificial Sequence: Synthetic peptide"
  source: /note="N-term Acetyl"
  MOD_RES (1)..(1): Atz(PEG10)
  MOD_RES (4)..(4): hArg
  MOD_RES (5)..(5): Cha
  MOD_RES (11)..(11): Nle
  MOD_RES (12)..(12): D-Phe
ARPRASHKGPLF

SEQ ID NO: 1117 - protein, 12 aa, Artificial Sequence
  source: /note="Description of Artificial Sequence: Synthetic peptide"
  MOD_RES (1)..(1): PyroGlu
  MOD_RES (2)..(2): Atz(PEG10)
  MOD_RES (4)..(4): hArg
  MOD_RES (5)..(5): Cha
  MOD_RES (11)..(11): Nle
  MOD_RES (12)..(12): D-Phe
EAPRASHKGPLF

SEQ ID NO: 1118 - protein, 12 aa, Artificial Sequence
  source: /note="Description of Artificial Sequence: Synthetic peptide"
  MOD_RES (1)..(1): PyroGlu
  MOD_RES (3)..(3): Atz(PEG10)
  MOD_RES (4)..(4): hArg
  MOD_RES (5)..(5): Cha
  MOD_RES (11)..(11): Nle
  MOD_RES (12)..(12): D-Phe
ERARASHKGPLF

SEQ ID NO: 1119 - protein, 12 aa, Artificial Sequence
  source: /note="Description of Artificial Sequence: Synthetic peptide"
  MOD_RES (1)..(1): PyroGlu
  MOD_RES (4)..(4): Atz(PEG10)
  MOD_RES (5)..(5): Cha
  MOD_RES (11)..(11): Nle
  MOD_RES (12)..(12): D-Phe
ERPAASHKGPLF

SEQ ID NO: 1120 - protein, 12 aa, Artificial Sequence
  source: /note="Description of Artificial Sequence: Synthetic peptide"
  MOD_RES (1)..(1): PyroGlu
  MOD_RES (4)..(4): hArg
  MOD_RES (5)..(5): Atz(PEG10)
  MOD_RES (11)..(11): Nle
  MOD_RES (12)..(12): D-Phe
ERPRASHKGPLF

SEQ ID NO: 1121 - protein, 12 aa, Artificial Sequence
  source: /note="Description of Artificial Sequence: Synthetic peptide"
  MOD_RES (1)..(1): PyroGlu
  MOD_RES (4)..(4): hArg
  MOD_RES (5)..(5): Cha
  MOD_RES (6)..(6): Atz(PEG10)
  MOD_RES (11)..(11): Nle
  MOD_RES (12)..(12): D-Phe
ERPRAAHKGPLF

SEQ ID NO: 1122 - protein, 12 aa, Artificial Sequence
  source: /note="Description of Artificial Sequence: Synthetic peptide"
  MOD_RES (1)..(1): PyroGlu
  MOD_RES (4)..(4): hArg
  MOD_RES (5)..(5): Cha
  MOD_RES (7)..(7): Atz(PEG10)
  MOD_RES (11)..(11): Nle
  MOD_RES (12)..(12): D-Phe
ERPRASAKGPLF

SEQ ID NO: 1123 - protein, 12 aa, Artificial Sequence
  source: /note="Description of Artificial Sequence: Synthetic peptide"
  MOD_RES (1)..(1): PyroGlu
  MOD_RES (4)..(4): hArg
  MOD_RES (5)..(5): Cha
  MOD_RES (8)..(8): Atz(PEG10)
  MOD_RES (11)..(11): Nle
  MOD_RES (12)..(12): D-Phe
ERPRASHAGPLF

SEQ ID NO: 1124 - protein, 12 aa, Artificial Sequence
  source: /note="Description of Artificial Sequence: Synthetic peptide"
  MOD_RES (1)..(1): PyroGlu
  MOD_RES (4)..(4): hArg
  MOD_RES (5)..(5): Cha
  MOD_RES (9)..(9): Atz(PEG10)
  MOD_RES (11)..(11): Nle
  MOD_RES (12)..(12): D-Phe
ERPRASHKAPLF

SEQ ID NO: 1125 - protein, 12 aa, Artificial Sequence
  source: /note="Description of Artificial Sequence: Synthetic peptide"
  MOD_RES (1)..(1): PyroGlu
  MOD_RES (4)..(4): hArg
  MOD_RES (5)..(5): Cha
  MOD_RES (10)..(10): Atz(PEG10)
  MOD_RES (11)..(11): Nle
  MOD_RES (12)..(12): D-Phe
ERPRASHKGALF

SEQ ID NO: 1126 - protein, 12 aa, Artificial Sequence
  source: /note="Description of Artificial Sequence: Synthetic peptide"
  MOD_RES (1)..(1): PyroGlu
  MOD_RES (4)..(4): hArg
  MOD_RES (5)..(5): Cha
  MOD_RES (11)..(11): Atz(PEG10)
  MOD_RES (12)..(12): D-Phe
ERPRASHKGPAF

SEQ ID NO: 1127 - protein, 12 aa, Artificial Sequence
  source: /note="Description of Artificial Sequence: Synthetic peptide"
  MOD_RES (1)..(1): PyroGlu
  MOD_RES (4)..(4): hArg
  MOD_RES (5)..(5): Cha
  MOD_RES (11)..(11): Nle
  MOD_RES (12)..(12): Atz(PEG10)
  source: /note="C-term Amide"
ERPRASHKGPLA

SEQ ID NO: 1128 - protein, 13 aa, Artificial Sequence
  source: /note="Description of Artificial Sequence: Synthetic peptide"
  MOD_RES (1)..(1): PyroGlu
  MOD_RES (4)..(4): hArg
  MOD_RES (5)..(5): Cha
  MOD_RES (11)..(11): Nle
  MOD_RES (12)..(12): D-Phe
  MOD_RES (13)..(13): Atz(PEG10)
  source: /note="C-term Amide"
ERPRASHKGPLFA

SEQ ID NO: 1129 - protein, 14 aa, Artificial Sequence
  source: /note="Description of Artificial Sequence: Synthetic peptide"
  MOD_RES (1)..(1): PyroGlu
  MOD_RES (4)..(4): hArg
  MOD_RES (5)..(5): Cha
  MOD_RES (11)..(11): Nle
  MOD_RES (12)..(12): D-Phe
  MOD_RES (14)..(14): Atz(PEG10)
  source: /note="C-term Amide"
ERPRASHKGPLFGA

SEQ ID NO: 1130 - protein, 15 aa, Artificial Sequence
  source: /note="Description of Artificial Sequence: Synthetic peptide"
  MOD_RES (1)..(1): PyroGlu
  MOD_RES (4)..(4): hArg
  MOD_RES (5)..(5): Cha
  MOD_RES (11)..(11): Nle
  MOD_RES (12)..(12): D-Phe
  MOD_RES (15)..(15): Atz(PEG10)
  source: /note="C-term Amide"
ERPRASHKGPLFGGA

SEQ ID NO: 1131 - protein, 13 aa, Artificial Sequence
  source: /note="Description of Artificial Sequence: Synthetic peptide"
  source: /note="N-term Acetyl"
  MOD_RES (1)..(1): Atz(PEG10)
  MOD_RES (5)..(5): hArg
  MOD_RES (6)..(6): NMeLeu
  MOD_RES (7)..(7): Atz(PEG10)
  MOD_RES (12)..(12): Nle
  MOD_RES (13)..(13): 4-Cl-F
ALRPRLAHKGPLF

SEQ ID NO: 1132 - protein, 12 aa, Artificial Sequence
  source: /note="Description of Artificial Sequence: Synthetic peptide"
  MOD_RES (1)..(1): PyroGlu
  MOD_RES (4)..(4): hArg
  MOD_RES (5)..(5): Cha
  MOD_RES (6)..(6): Atz(PEG10)
  MOD_RES (11)..(11): Nle
  MOD_RES (12)..(12): 4-Cl-F
ERPRAAHKGPLF

SEQ ID NO: 1133 - protein, 12 aa, Artificial Sequence
  source: /note="Description of Artificial Sequence: Synthetic peptide"
  MOD_RES (1)..(1): PyroGlu
  MOD_RES (4)..(4): hArg
  MOD_RES (5)..(5): Cha
  MOD_RES (6)..(6): Atz(PEG10)
  MOD_RES (10)..(10): Oic
  MOD_RES (11)..(11): Nle
  MOD_RES (12)..(12): 4-Cl-F
ERPRAAHKGXLF

SEQ ID NO: 1134 - protein, 12 aa, Artificial Sequence
  source: /note="Description of Artificial Sequence: Synthetic peptide"
  MOD_RES (1)..(1): PyroGlu
  MOD_RES (4)..(4): hArg
  MOD_RES (5)..(5): Cha
  MOD_RES (6)..(6): Atz(PEG10)
  MOD_RES (10)..(10): Oic
  MOD_RES (11)..(11): Nle
  MOD_RES (12)..(12): 4-Cl-F
  source: /note="C-term Amide"
ERPRAAHKGXLF

SEQ ID NO: 1135 - protein, 12 aa, Artificial Sequence
  source: /note="Description of Artificial Sequence: Synthetic peptide"
  MOD_RES (1)..(1): PyroGlu
  MOD_RES (4)..(4): hArg
  MOD_RES (5)..(5): Cha
  MOD_RES (7)..(7): Atz(PEG10)
  MOD_RES (10)..(10): Oic
  MOD_RES (11)..(11): Nle
  MOD_RES (12)..(12): 4-Cl-F
ERPRAFAKGXLF

SEQ ID NO: 1136 - protein, 12 aa, Artificial Sequence
  source: /note="Description of Artificial Sequence: Synthetic peptide"
  MOD_RES (1)..(1): PyroGlu
  MOD_RES (4)..(4): hArg
  MOD_RES (5)..(5): Cha
  MOD_RES (7)..(7): Atz(PEG10)
  MOD_RES (10)..(10): Oic
  MOD_RES (11)..(11): Nle
  MOD_RES (12)..(12): 4-Cl-F
  source: /note="C-term Amide"
ERPRAFAKGXLF

SEQ ID NO: 1137 - protein, 12 aa, Artificial Sequence
  source: /note="Description of Artificial Sequence: Synthetic peptide"
  MOD_RES (1)..(1): PyroGlu
  MOD_RES (4)..(4): hArg
  MOD_RES (5)..(5): NMeLeu
  MOD_RES (7)..(7): Atz(PEG10)
  MOD_RES (10)..(10): Oic
  MOD_RES (11)..(11): Nle
  MOD_RES (12)..(12): 4-Cl-F
ERPRLFAKGXLF

SEQ ID NO: 1138 - protein, 12 aa, Artificial Sequence
  source: /note="Description of Artificial Sequence: Synthetic peptide"
  MOD_RES (1)..(1): PyroGlu
  MOD_RES (4)..(4): hArg
  MOD_RES (5)..(5): NMeLeu
  MOD_RES (7)..(7): Atz(PEG10)
  MOD_RES (10)..(10): Oic
  MOD_RES (11)..(11): Nle
  MOD_RES (12)..(12): 4-Cl-F
  source: /note="C-term Amide"
ERPRLFAKGXLF

SEQ ID NO: 1139 - protein, 12 aa, Artificial Sequence
  source: /note="Description of Artificial Sequence: Synthetic peptide"
  MOD_RES (1)..(1): PyroGlu
  MOD_RES (4)..(4): hArg
  MOD_RES (5)..(5): NMeLeu
  MOD_RES (6)..(6): Atz(PEG10)
  MOD_RES (11)..(11): Nle
  MOD_RES (12)..(12): 4-Cl-F
ERPRLAHKGPLF

SEQ ID NO: 1140 - protein, 12 aa, Artificial Sequence
  source: /note="Description of Artificial Sequence: Synthetic peptide"
  MOD_RES (1)..(1): PyroGlu
  MOD_RES (4)..(4): hArg
  MOD_RES (5)..(5): NMeLeu
  MOD_RES (6)..(6): Atz(PEG10)
  MOD_RES (10)..(10): Oic
  MOD_RES (11)..(11): Nle
  MOD_RES (12)..(12): 4-Cl-F
ERPRLAHKGXLF

SEQ ID NO: 1141 - protein, 12 aa, Artificial Sequence
  source: /note="Description of Artificial Sequence: Synthetic peptide"
  MOD_RES (1)..(1): PyroGlu
  MOD_RES (4)..(4): hArg
  MOD_RES (5)..(5): NMeLeu
  MOD_RES (6)..(6): Atz(PEG10)
  MOD_RES (10)..(10): Oic
  MOD_RES (11)..(11): Nle
  MOD_RES (12)..(12): 4-Cl-F
  source: /note="C-term Amide"
ERPRLAHKGXLF

SEQ ID NO: 1142 - protein, 13 aa, Artificial Sequence
  source: /note="Description of Artificial Sequence: Synthetic peptide"
  source: /note="N-term Acetyl"
  MOD_RES (1)..(1): Atz(PEG10)
  MOD_RES (5)..(5): hArg
  MOD_RES (6)..(6): NMeLeu
  MOD_RES (7)..(7): Atz(PEG10)
  MOD_RES (12)..(12): Nle
  MOD_RES (13)..(13): D-Phe
ALRPRLAHKGPLF

SEQ ID NO: 1143 - protein, 12 aa, Artificial Sequence
  source: /note="Description of Artificial Sequence: Synthetic peptide"
  MOD_RES (1)..(1): PyroGlu
  MOD_RES (4)..(4): hArg
  MOD_RES (5)..(5): Cha
  MOD_RES (6)..(6): Atz(PEG10)
  MOD_RES (11)..(11): Nle
  MOD_RES (12)..(12): D-Phe
ERPRAAHKGPLF

SEQ ID NO: 1144 - protein, 12 aa, Artificial Sequence
  source: /note="Description of Artificial Sequence: Synthetic peptide"
  MOD_RES (1)..(1): PyroGlu
  MOD_RES (4)..(4): hArg
  MOD_RES (5)..(5): Cha
  MOD_RES (6)..(6): Atz(PEG10)
  MOD_RES (10)..(10): Oic
  MOD_RES (11)..(11): Nle
  MOD_RES (12)..(12): D-Phe
ERPRAAHKGXLF

SEQ ID NO: 1145 - protein, 12 aa, Artificial Sequence
  source: /note="Description of Artificial Sequence: Synthetic peptide"
  MOD_RES (1)..(1): PyroGlu
  MOD_RES (4)..(4): hArg
  MOD_RES (5)..(5): Cha
  MOD_RES (7)..(7): Atz(PEG10)
  MOD_RES (11)..(11): Nle
  MOD_RES (12)..(12): D-Phe
ERPRAFAKGPLF

SEQ ID NO: 1146 - protein, 12 aa, Artificial Sequence
  source: /note="Description of Artificial Sequence: Synthetic peptide"
  MOD_RES (1)..(1): PyroGlu
  MOD_RES (4)..(4): hArg
  MOD_RES (5)..(5): Cha
  MOD_RES (7)..(7): Atz(PEG10)
  MOD_RES (10)..(10): Oic
  MOD_RES (11)..(11): Nle
  MOD_RES (12)..(12): D-Phe
ERPRAFAKGXLF

SEQ ID NO: 1147 - protein, 12 aa, Artificial Sequence
  source: /note="Description of Artificial Sequence: Synthetic peptide"
  MOD_RES (1)..(1): PyroGlu
  MOD_RES (4)..(4): hArg
  MOD_RES (5)..(5): Cha
  MOD_RES (7)..(7): Atz(PEG10)
  MOD_RES (11)..(11): Nle
  MOD_RES (12)..(12): D-Phe
  source: /note="C-term Amide"
ERPRAFAKGPLF

SEQ ID NO: 1148 - protein, 12 aa, Artificial Sequence
  source: /note="Description of Artificial Sequence: Synthetic peptide"
  MOD_RES (1)..(1): PyroGlu
  MOD_RES (4)..(4): hArg
  MOD_RES (5)..(5): Cha
  MOD_RES (7)..(7): Atz(PEG10)
  MOD_RES (10)..(10): Oic
  MOD_RES (11)..(11): Nle
  MOD_RES (12)..(12): D-Phe
  source: /note="C-term Amide"
ERPRAFAKGXLF

SEQ ID NO: 1149 - protein, 12 aa, Artificial Sequence
  source: /note="Description of Artificial Sequence: Synthetic peptide"
  MOD_RES (1)..(1): PyroGlu
  MOD_RES (4)..(4): hArg
  MOD_RES (5)..(5): NMeLeu
  MOD_RES (7)..(7): Atz(PEG10)
  MOD_RES (11)..(11): Nle
  MOD_RES (12)..(12): D-Phe
ERPRLFAKGPLF

SEQ ID NO: 1150 - protein, 12 aa, Artificial Sequence
  source: /note="Description of Artificial Sequence: Synthetic peptide"
  MOD_RES (1)..(1): PyroGlu
  MOD_RES (4)..(4): hArg
  MOD_RES (5)..(5): NMeLeu
  MOD_RES (7)..(7): Atz(PEG10)
  MOD_RES (10)..(10): Oic
  MOD_RES (11)..(11): Nle
  MOD_RES (12)..(12): D-Phe
ERPRLFAKGXLF

SEQ ID NO: 1151 - protein, 12 aa, Artificial Sequence
  source: /note="Description of Artificial Sequence: Synthetic peptide"
  MOD_RES (1)..(1): PyroGlu
  MOD_RES (4)..(4): hArg
  MOD_RES (5)..(5): NMeLeu
  MOD_RES (7)..(7): Atz(PEG10)
  MOD_RES (11)..(11): Nle
  MOD_RES (12)..(12): D-Phe
  source: /note="C-term Amide"
ERPRLFAKGPLF

SEQ ID NO: 1152 - protein, 12 aa, Artificial Sequence
  source: /note="Description of Artificial Sequence: Synthetic peptide"
  MOD_RES (1)..(1): PyroGlu
  MOD_RES (4)..(4): hArg
  MOD_RES (5)..(5): NMeLeu
  MOD_RES (7)..(7): Atz(PEG10)
  MOD_RES (10)..(10): Oic
  MOD_RES (11)..(11): Nle
  MOD_RES (12)..(12): D-Phe
  source: /note="C-term Amide"
ERPRLFAKGXLF

SEQ ID NO: 1153 - protein, 12 aa, Artificial Sequence
  source: /note="Description of Artificial Sequence: Synthetic peptide"
  MOD_RES (1)..(1): PyroGlu
  MOD_RES (4)..(4): hArg
  MOD_RES (5)..(5): NMeLeu
  MOD_RES (6)..(6): Atz(PEG10)
  MOD_RES (11)..(11): Nle
  MOD_RES (12)..(12): D-Phe
ERPRLAHKGPLF

SEQ ID NO: 1154 - protein, 13 aa, Artificial Sequence
  source: /note="Description of Artificial Sequence: Synthetic peptide"
  MOD_RES (1)..(1): PyroGlu
  MOD_RES (4)..(4): hArg
  MOD_RES (12)..(12): 1-Nal
ERPRLFHKGPMAF

SEQ ID NO: 1155 - protein, 12 aa, Artificial Sequence
  source: /note="Description of Artificial Sequence: Synthetic peptide"
  MOD_RES (1)..(1): PyroGlu
  MOD_RES (4)..(4): hArg
  MOD_RES (5)..(5): NMeLeu
  MOD_RES (6)..(6): Atz(PEG10)
  MOD_RES (10)..(10): Oic
  MOD_RES (11)..(11): Nle
  MOD_RES (12)..(12): D-Phe
ERPRLAHKGXLF

SEQ ID NO: 1156 - protein, 12 aa, Artificial Sequence
  source: /note="Description of Artificial Sequence: Synthetic peptide"
  MOD_RES (1)..(1): PyroGlu
  MOD_RES (4)..(4): hArg
  MOD_RES (5)..(5): NMeLeu
  MOD_RES (6)..(6): Atz(20K-mPEG)
  MOD_RES (10)..(10): Oic
  MOD_RES (11)..(11): Nle
  MOD_RES (12)..(12): 4-Cl-F
ERPRLAHKGXLF

SEQ ID NO: 1157 - protein, 12 aa, Artificial Sequence
  source: /note="Description of Artificial Sequence: Synthetic peptide"
  MOD_RES (1)..(1): PyroGlu
  MOD_RES (4)..(4): hArg
  MOD_RES (5)..(5): Cha
  MOD_RES (6)..(6): Atz(20K-mPEG)
  MOD_RES (10)..(10): Oic
  MOD_RES (11)..(11): Nle
  MOD_RES (12)..(12): 4-Cl-F
ERPRAAHKGXLF

SEQ ID NO: 1158 - protein, 12 aa, Artificial Sequence
  source: /note="Description of Artificial Sequence: Synthetic peptide"
  MOD_RES (1)..(1): PyroGlu
  MOD_RES (4)..(4): hArg
  MOD_RES (5)..(5): NMeLeu
  MOD_RES (7)..(7): Atz(20K-mPEG)
  MOD_RES (10)..(10): Oic
  MOD_RES (11)..(11): Nle
  MOD_RES (12)..(12): D-Phe
ERPRLFAKGXLF

SEQ ID NO: 1159 - protein, 13 aa, Artificial Sequence
  source: /note="Description of Artificial Sequence: Synthetic peptide"
  source: /note="N-term Acetyl"
  MOD_RES (1)..(1): Atz(20K-mPEG)
  MOD_RES (5)..(5): hArg
  MOD_RES (6)..(6): Cha
  MOD_RES (12)..(12): Nle
  MOD_RES (13)..(13): D-1Nal
ALRPRASHKGPLA

SEQ ID NO: 1160 - protein, 14 aa, Artificial Sequence
  source: /note="Description of Artificial Sequence: Synthetic peptide"
  source: /note="N-term Acetyl"
  MOD_RES (1)..(1): Atz(20K-mPEG)
  MOD_RES (2)..(2): Ahx
  MOD_RES (6)..(6): hArg
  MOD_RES (7)..(7): Cha
  MOD_RES (13)..(13): Nle
  MOD_RES (14)..(14): D-1Nal
AXLRPRASHKGPLA

SEQ ID NO: 1161 - protein, 14 aa, Artificial Sequence
  source: /note="Description of Artificial Sequence: Synthetic peptide"
  source: /note="N-term Acetyl"
  MOD_RES (1)..(1): Atz(PEG10)
  MOD_RES (5)..(5): hArg
  MOD_RES (6)..(6): NMeLeu
  MOD_RES (7)..(7): Atz(PEG10)
  MOD_RES (12)..(12): Nle
  MOD_RES (14)..(14): 4-Cl-F
ALRPRLAHKGPLPF

SEQ ID NO: 1162 - protein, 13 aa, Artificial Sequence
  source: /note="Description of Artificial Sequence: Synthetic peptide"
  MOD_RES (1)..(1): PyroGlu
  MOD_RES (4)..(4): hArg
  MOD_RES (5)..(5): Cha
  MOD_RES (6)..(6): Atz(PEG10)
  MOD_RES (11)..(11): Nle
  MOD_RES (13)..(13): 4-Cl-F
ERPRAAHKGPLPF

SEQ ID NO: 1163 - protein, 13 aa, Artificial Sequence
  source: /note="Description of Artificial Sequence: Synthetic peptide"
  MOD_RES (1)..(1): PyroGlu
  MOD_RES (4)..(4): hArg
  MOD_RES (5)..(5): Cha
  MOD_RES (6)..(6): Atz(PEG10)
  MOD_RES (10)..(10): Oic
  MOD_RES (11)..(11): Nle
  MOD_RES (13)..(13): 4-Cl-F
ERPRAAHKGXLPF

SEQ ID NO: 1164 - protein, 13 aa, Artificial Sequence
  source: /note="Description of Artificial Sequence: Synthetic peptide"
  MOD_RES (1)..(1): PyroGlu
  MOD_RES (4)..(4): hArg
  MOD_RES (5)..(5): Cha
  MOD_RES (6)..(6): Atz(PEG10)
  MOD_RES (10)..(10): Oic
  MOD_RES (11)..(11): Nle
  MOD_RES (13)..(13): 4-Cl-F
  source: /note="C-term Amide"
ERPRAAHKGXLPF

SEQ ID NO: 1165 - protein, 13 aa, Artificial Sequence
  source: /note="Description of Artificial Sequence: Synthetic peptide"
  MOD_RES (1)..(1): PyroGlu
  MOD_RES (4)..(4): hArg
  MOD_RES (5)..(5): NMeLeu
  MOD_RES (6)..(6): Atz(PEG10)
  MOD_RES (11)..(11): Nle
  MOD_RES (13)..(13): 4-Cl-F
ERPRLAHKGPLPF

SEQ ID NO: 1166 - protein, 13 aa, Artificial Sequence
  source: /note="Description of Artificial Sequence: Synthetic peptide"
  MOD_RES (1)..(1): PyroGlu
  MOD_RES (4)..(4): hArg
  MOD_RES (5)..(5): NMeLeu
  MOD_RES (6)..(6): Atz(PEG10)
  MOD_RES (10)..(10): Oic
  MOD_RES (11)..(11): Nle
  MOD_RES (13)..(13): 4-Cl-F
ERPRLAHKGXLPF

SEQ ID NO: 1167 - protein, 13 aa, Artificial Sequence
  source: /note="Description of Artificial Sequence: Synthetic peptide"
  MOD_RES (1)..(1): PyroGlu
  MOD_RES (4)..(4): hArg
  MOD_RES (5)..(5): NMeLeu
  MOD_RES (6)..(6): Atz(PEG10)
  MOD_RES (10)..(10): Oic
  MOD_RES (11)..(11): Nle
  MOD_RES (13)..(13): 4-Cl-F
  source: /note="C-term Amide"
ERPRLAHKGXLPF

SEQ ID NO: 1168 - protein, 13 aa, Artificial Sequence
  source: /note="Description of Artificial Sequence: Synthetic peptide"
  MOD_RES (1)..(1): PyroGlu
  MOD_RES (4)..(4): hArg
  MOD_RES (5)..(5): Cha
  MOD_RES (6)..(6): Atz(1K-mPEG)
  MOD_RES (10)..(10): Oic
  MOD_RES (11)..(11): Nle
  MOD_RES (13)..(13): 4-Cl-F
ERPRAAHKGXLPF

SEQ ID NO: 1169 - protein, 13 aa, Artificial Sequence
  source: /note="Description of Artificial Sequence: Synthetic peptide"
  MOD_RES (1)..(1): PyroGlu
  MOD_RES (4)..(4): hArg
  MOD_RES (5)..(5): Cha
  MOD_RES (6)..(6): Atz(2K-mPEG)
  MOD_RES (10)..(10): Oic
  MOD_RES (11)..(11): Nle
  MOD_RES (13)..(13): 4-Cl-F
ERPRAAHKGXLPF

SEQ ID NO: 1170 - protein, 13 aa, Artificial Sequence
  source: /note="Description of Artificial Sequence: Synthetic peptide"
  MOD_RES (1)..(1): PyroGlu
  MOD_RES (4)..(4): hArg
  MOD_RES (5)..(5): Cha
  MOD_RES (6)..(6): Atz(5K-mPEG)
  MOD_RES (10)..(10): Oic
  MOD_RES (11)..(11): Nle
  MOD_RES (13)..(13): 4-Cl-F
ERPRAAHKGXLPF

SEQ ID NO: 1171 - protein, 13 aa, Artificial Sequence
  source: /note="Description of Artificial Sequence: Synthetic peptide"
  MOD_RES (1)..(1): PyroGlu
  MOD_RES (4)..(4): hArg
  MOD_RES (5)..(5): Cha
  MOD_RES (6)..(6): Atz(10K-mPEG)
  MOD_RES (10)..(10): Oic
  MOD_RES (11)..(11): Nle
  MOD_RES (13)..(13): 4-Cl-F
ERPRAAHKGXLPF

SEQ ID NO: 1172 - protein, 13 aa, Artificial Sequence
  source: /note="Description of Artificial Sequence: Synthetic peptide"
  MOD_RES (1)..(1): PyroGlu
  MOD_RES (5)..(5): Chg
  MOD_RES (12)..(12): 1-Nal
ERPRGFHKGPMAF

SEQ ID NO: 1173 - protein, 13 aa, Artificial Sequence
  source: /note="Description of Artificial Sequence: Synthetic peptide"
  MOD_RES (1)..(1): PyroGlu
  MOD_RES (5)..(5): NMeLeu
  MOD_RES (12)..(12): 1-Nal
ERPRLFHKGPMAF

SEQ ID NO: 1174 - protein, 13 aa, Artificial Sequence
  source: /note="Description of Artificial Sequence: Synthetic peptide"
  MOD_RES (1)..(1): PyroGlu
  MOD_RES (5)..(5): Cha
  MOD_RES (12)..(12): 1-Nal
ERPRAFHKGPFAF

SEQ ID NO: 1175 - protein, 13 aa, Artificial Sequence
  source: /note="Description of Artificial Sequence: Synthetic peptide"
  MOD_RES (1)..(1): PyroGlu
  MOD_RES (4)..(4): hArg
  MOD_RES (5)..(5): Cha
  MOD_RES (12)..(12): 1-Nal
ERPRAFHKGPFAF

SEQ ID NO: 1176 - protein, 13 aa, Artificial Sequence
  source: /note="Description of Artificial Sequence: Synthetic peptide"
  MOD_RES (1)..(1): PyroGlu
  MOD_RES (5)..(5): NMeLeu
  MOD_RES (11)..(11): Nle
  MOD_RES (12)..(12): 1-Nal
ERPRLFHKGPLAF

SEQ ID NO: 1177 - protein, 13 aa, Artificial Sequence
  source: /note="Description of Artificial Sequence: Synthetic peptide"
  MOD_RES (1)..(1): PyroGlu
  MOD_RES (4)..(4): hArg
  MOD_RES (5)..(5): Cha
  MOD_RES (11)..(11): pI-Phe
  MOD_RES (12)..(12): 1-Nal
ERPRAFHKGPFAF

SEQ ID NO: 1178 - protein, 13 aa, Artificial Sequence
  source: /note="Description of Artificial Sequence: Synthetic peptide"
  MOD_RES (1)..(1): PyroGlu
  MOD_RES (4)..(4): hArg
  MOD_RES (5)..(5): Cha
  MOD_RES (6)..(6): Atz(20K-mPEG)
  MOD_RES (10)..(10): Oic
  MOD_RES (11)..(11): Nle
  MOD_RES (13)..(13): 4-Cl-F
ERPRAAHKGXLPF

SEQ ID NO: 1179 - protein, 12 aa, Artificial Sequence
  source: /note="Description of Artificial Sequence: Synthetic peptide"
  MOD_RES (1)..(1): PyroGlu
  MOD_RES (4)..(4): hArg
  MOD_RES (5)..(5): NMeLeu
  MOD_RES (6)..(6): Atz(20K-mPEG)
  MOD_RES (10)..(10): Oic
  MOD_RES (11)..(11): Nle
  MOD_RES (12)..(12): 4-Cl-F
ERPRLAHKGXLF

SEQ ID NO: 1180 - protein, 12 aa, Artificial Sequence
  source: /note="Description of Artificial Sequence: Synthetic peptide"
  MOD_RES (1)..(1): PyroGlu
  MOD_RES (4)..(4): hArg
  MOD_RES (5)..(5): Cha
  MOD_RES (6)..(6): Atz(20K-mPEG)
  MOD_RES (10)..(10): Oic
  MOD_RES (11)..(11): Nle
  MOD_RES (12)..(12): 4-Cl-F
ERPRAAHKGXLF

SEQ ID NO: 1181 - protein, 13 aa, Artificial Sequence
  source: /note="Description of Artificial Sequence: Synthetic peptide"
  MOD_RES (1)..(1): PyroGlu
  MOD_RES (4)..(4): hArg
  MOD_RES (5)..(5): NMeLeu
  MOD_RES (6)..(6): Atz(20K-mPEG)
  MOD_RES (10)..(10): Oic
  MOD_RES (11)..(11): Nle
  MOD_RES (13)..(13): 4-Cl-F
ERPRLAHKGXLPF

SEQ ID NO: 1182 - protein, 13 aa, Artificial Sequence
  source: /note="Description of Artificial Sequence: Synthetic peptide"
  MOD_RES (1)..(1): PyroGlu
  MOD_RES (4)..(4): hArg
  MOD_RES (5)..(5): Cha
  MOD_RES (7)..(7): Atz(1K-mPEG)
  MOD_RES (10)..(10): Oic
  MOD_RES (11)..(11): Nle
  MOD_RES (13)..(13): 4-Cl-F
ERPRASAKGXLPF

SEQ ID NO: 1183 - protein, 13 aa, Artificial Sequence
  source: /note="Description of Artificial Sequence: Synthetic peptide"
  MOD_RES (1)..(1): PyroGlu
  MOD_RES (4)..(4): hArg
  MOD_RES (5)..(5): Cha
  MOD_RES (7)..(7): Atz(2K-mPEG)
  MOD_RES (10)..(10): Oic
  MOD_RES (11)..(11): Nle
  MOD_RES (13)..(13): 4-Cl-F
ERPRASAKGXLPF

SEQ ID NO: 1184 - protein, 13 aa, Artificial Sequence
  source: /note="Description of Artificial Sequence: Synthetic peptide"
  MOD_RES (1)..(1): PyroGlu
  MOD_RES (4)..(4): hArg
  MOD_RES (5)..(5): Cha
  MOD_RES (7)..(7): Atz(5K-mPEG)
  MOD_RES (10)..(10): Oic
  MOD_RES (11)..(11): Nle
  MOD_RES (13)..(13): 4-Cl-F
ERPRASAKGXLPF

SEQ ID NO: 1185 - protein, 13 aa, Artificial Sequence
  source: /note="Description of Artificial Sequence: Synthetic peptide"
  MOD_RES (1)..(1): PyroGlu
  MOD_RES (4)..(4): hArg
  MOD_RES (5)..(5): Cha
  MOD_RES (7)..(7): Atz(10K-mPEG)
  MOD_RES (10)..(10): Oic
  MOD_RES (11)..(11): Nle
  MOD_RES (13)..(13): 4-Cl-F
ERPRASAKGXLPF

SEQ ID NO: 1186 - protein, 13 aa, Artificial Sequence
  source: /note="Description of Artificial Sequence: Synthetic peptide"
  MOD_RES (1)..(1): PyroGlu
  MOD_RES (4)..(4): hArg
  MOD_RES (5)..(5): Cha
  MOD_RES (7)..(7): Atz(20K-mPEG)
  MOD_RES (10)..(10): Oic
  MOD_RES (11)..(11): Nle
  MOD_RES (13)..(13): 4-Cl-F
ERPRASAKGXLPF

SEQ ID NO: 1187 - protein, 12 aa, Artificial Sequence
  source: /note="Description of Artificial Sequence: Synthetic peptide"
  MOD_RES (1)..(1): PyroGlu
  MOD_RES (4)..(4): hArg
  MOD_RES (5)..(5): NMeLeu
  MOD_RES (7)..(7): Atz(20K-mPEG)
  MOD_RES (10)..(10): Oic
  MOD_RES (11)..(11): Nle
  MOD_RES (12)..(12): D-Phe
ERPRLFAKGXLF

SEQ ID NO: 1188 - protein, 14 aa, Artificial Sequence
  source: /note="Description of Artificial Sequence: Synthetic peptide"
  source: /note="N-term Acetyl"
  MOD_RES (1)..(1): Atz(20K-mPEG)
  MOD_RES (5)..(5): hArg
  MOD_RES (6)..(6): NMeLeu
  MOD_RES (7)..(7): Atz(20K-mPEG)
  MOD_RES (12)..(12): Nle
  MOD_RES (14)..(14): 4-Cl-F
ALRPRLAHKGPLPF

SEQ ID NO: 1189 - protein, 14 aa, Artificial Sequence
  source: /note="Description of Artificial Sequence: Synthetic peptide"
  MOD_RES (1)..(1): PyroGlu
  MOD_RES (4)..(4): hArg
  MOD_RES (5)..(5): NMeLeu
  MOD_RES (11)..(11): Nle
  MOD_RES (13)..(13): D-Bip
  MOD_RES (14)..(14): K(Ac-Atz(20K-mPEG))
ERPRLSHKGPLPFK

SEQ ID NO: 1190 - protein, 14 aa, Artificial Sequence
  source: /note="Description of Artificial Sequence: Synthetic peptide"
  source: /note="N-term Acetyl"
  MOD_RES (1)..(1): Atz(1K-mPEG)
  MOD_RES (5)..(5): hArg
  MOD_RES (6)..(6): Cha
  MOD_RES (11)..(11): Oic
  MOD_RES (12)..(12): Nle
  MOD_RES (14)..(14): 4-Cl-F
ALRPRASHKGXLPF

SEQ ID NO: 1191 - protein, 14 aa, Artificial Sequence
  source: /note="Description of Artificial Sequence: Synthetic peptide"
  source: /note="N-term Acetyl"
  MOD_RES (1)..(1): Atz(2K-mPEG)
  MOD_RES (5)..(5): hArg
  MOD_RES (6)..(6): Cha
  MOD_RES (11)..(11): Oic
  MOD_RES (12)..(12): Nle
  MOD_RES (14)..(14): 4-Cl-F
ALRPRASHKGXLPF

SEQ ID NO: 1192 - protein, 14 aa, Artificial Sequence
  source: /note="Description of Artificial Sequence: Synthetic peptide"
  source: /note="N-term Acetyl"
  MOD_RES (1)..(1): Atz(5K-mPEG)
  MOD_RES (5)..(5): hArg
  MOD_RES (6)..(6): Cha
  MOD_RES (11)..(11): Oic
  MOD_RES (12)..(12): Nle
  MOD_RES (14)..(14): 4-Cl-F
ALRPRASHKGXLPF

SEQ ID NO: 1193 - protein, 14 aa, Artificial Sequence
  source: /note="Description of Artificial Sequence: Synthetic peptide"
  source: /note="N-term Acetyl"
  MOD_RES (1)..(1): Atz(10K-mPEG)
  MOD_RES (5)..(5): hArg
  MOD_RES (6)..(6): Cha
  MOD_RES (11)..(11): Oic
  MOD_RES (12)..(12): Nle
  MOD_RES (14)..(14): 4-Cl-F
ALRPRASHKGXLPF

SEQ ID NO: 1194 - protein, 14 aa, Artificial Sequence
  source: /note="Description of Artificial Sequence: Synthetic peptide"
  source: /note="N-term Acetyl"
  MOD_RES (1)..(1): Atz(20K-mPEG)
  MOD_RES (5)..(5): hArg
  MOD_RES (6)..(6): Cha
  MOD_RES (11)..(11): Oic
  MOD_RES (12)..(12): Nle
  MOD_RES (14)..(14): 4-Cl-F
ALRPRASHKGXLPF

SEQ ID NO: 1195 - protein, 18 aa, Artificial Sequence
  source: /note="Description of Artificial Sequence: Synthetic peptide"
  MOD_RES (1)..(1): Atz(20K-mPEG)
  MOD_RES (9)..(9): hArg
  MOD_RES (10)..(10): Cha
  MOD_RES (15)..(15): Oic
  MOD_RES (16)..(16): Nle
  MOD_RES (18)..(18): 4-Cl-F
AKFRRQRPRASHKGXLPF

SEQ ID NO: 1196 - protein, 13 aa, Artificial Sequence
  source: /note="Description of Artificial Sequence: Synthetic peptide"
  source: /note="N-term Acetyl"
  MOD_RES (1)..(1): Atz(20K-mPEG)
  MOD_RES (5)..(5): hArg
  MOD_RES (6)..(6): Cha
  MOD_RES (12)..(12): Nle
  MOD_RES (13)..(13): D-1Nal
ALRPRASHKGPLA

SEQ ID NO: 1197 - protein, 14 aa, Artificial Sequence
  source: /note="Description of Artificial Sequence: Synthetic peptide"
  source: /note="N-term Acetyl"
  MOD_RES (1)..(1): Atz(20K-mPEG)
  MOD_RES (2)..(2): Ahx
  MOD_RES (6)..(6): hArg
  MOD_RES (7)..(7): Cha
  MOD_RES (13)..(13): Nle
  MOD_RES (14)..(14): D-1Nal
AXLRPRASHKGPLA

SEQ ID NO: 1198 - protein, 14 aa, Artificial Sequence
  source: /note="Description of Artificial Sequence: Synthetic peptide"
  MOD_RES (1)..(1): Atz(20K-mPEG)
  MOD_RES (5)..(5): hArg
  MOD_RES (6)..(6): Cha
  MOD_RES (11)..(11): Oic
  MOD_RES (12)..(12): Nle
  MOD_RES (14)..(14): 4-Cl-F
ALRPRASHKGXLPF

SEQ ID NO: 1199 - protein, 13 aa, Artificial Sequence
  source: /note="Description of Artificial Sequence: Synthetic peptide"
  source: /note="N-term Thiopropionyl(20K-mPEG)"
  MOD_RES (4)..(4): hArg
  MOD_RES (5)..(5): Cha
  MOD_RES (10)..(10): Oic
  MOD_RES (11)..(11): Nle
  MOD_RES (13)..(13): 4-Cl-F
LRPRASHKGXLPF

SEQ ID NO: 1200 - protein, 17 aa, Artificial Sequence
  source: /note="Description of Artificial Sequence: Synthetic peptide"
  source: /note="N-term Thiopropionyl(20K-mPEG)"
  MOD_RES (8)..(8): hArg
  MOD_RES (9)..(9): Cha
  MOD_RES (14)..(14): Oic
  MOD_RES (15)..(15): Nle
  MOD_RES (17)..(17): 4-Cl-F
KFRRQRPRASHKGXLPF

SEQ ID NO: 1201 - protein, 17 aa, Artificial Sequence
  source: /note="Description of Artificial Sequence: Synthetic peptide"
  source: /note="N-term Thiopropionyl(40K-mPEG)"
  MOD_RES (8)..(8): hArg
  MOD_RES (9)..(9): Cha
  MOD_RES (14)..(14): Oic
  MOD_RES (15)..(15): Nle
  MOD_RES (17)..(17): 4-Cl-F
KFRRQRPRASHKGXLPF

SEQ ID NO: 1202 - protein, 14 aa, Artificial Sequence
  source: /note="Description of Artificial Sequence: Synthetic peptide"
  source: /note="N-term Thiopropionyl(20K-mPEG)"
  MOD_RES (5)..(5): hArg
  MOD_RES (6)..(6): Cha
  MOD_RES (11)..(11): Oic
  MOD_RES (12)..(12): Nle
  MOD_RES (14)..(14): 4-Cl-F
LLRPRASHKGXLPF

SEQ ID NO: 1203 - protein, 16 aa, Artificial Sequence
  source: /note="Description of Artificial Sequence: Synthetic peptide"
  source: /note="N-term Thiopropionyl(20K-mPEG)"
  MOD_RES (7)..(7): hArg
  MOD_RES (8)..(8): Cha
  MOD_RES (13)..(13): Oic
  MOD_RES (14)..(14): Nle
  MOD_RES (16)..(16): 4-Cl-F
FRRQRPRASHKGXLPF

SEQ ID NO: 1204 - protein, 15 aa, Artificial Sequence
  source: /note="Description of Artificial Sequence: Synthetic peptide"
  source: /note="N-term Thiopropionyl(20K-mPEG)"
  MOD_RES (6)..(6): hArg
  MOD_RES (7)..(7): Cha
  MOD_RES (12)..(12): Oic
  MOD_RES (13)..(13): Nle
  MOD_RES (15)..(15): 4-Cl-F
RRQRPRASHKGXLPF

SEQ ID NO: 1205 - protein, 14 aa, Artificial Sequence
  source: /note="Description of Artificial Sequence: Synthetic peptide"
  source: /note="N-term Thiopropionyl(20K-mPEG)"
  MOD_RES (5)..(5): hArg
  MOD_RES (6)..(6): Cha
  MOD_RES (11)..(11): Oic
  MOD_RES (12)..(12): Nle
  MOD_RES (14)..(14): 4-Cl-F
RQRPRASHKGXLPF

SEQ ID NO: 1206 - protein, 13 aa, Artificial Sequence
  source: /note="Description of Artificial Sequence: Synthetic peptide"
  source: /note="N-term Thiopropionyl(20K-mPEG)"
  MOD_RES (4)..(4): hArg
  MOD_RES (5)..(5): Cha
  MOD_RES (10)..(10): Oic
  MOD_RES (11)..(11): Nle
  MOD_RES (13)..(13): 4-Cl-F
QRPRASHKGXLPF

SEQ ID NO: 1207 - protein, 13 aa, Artificial Sequence
  source: /note="Description of Artificial Sequence: Synthetic peptide"
  source: /note="N-term Thiopropionyl(1K-mPEG)"
  MOD_RES (4)..(4): hArg
  MOD_RES (5)..(5): Cha
  MOD_RES (10)..(10): Oic
  MOD_RES (11)..(11): Nle
  MOD_RES (13)..(13): 4-Cl-F
QRPRASHKGXLPF

SEQ ID NO: 1208 - protein, 13 aa, Artificial Sequence
  source: /note="Description of Artificial Sequence: Synthetic peptide"
  source: /note="N-term Thiopropionyl(2K-mPEG)"
  MOD_RES (4)..(4): hArg
  MOD_RES (5)..(5): Cha
  MOD_RES (10)..(10): Oic
  MOD_RES (11)..(11): Nle
  MOD_RES (13)..(13): 4-Cl-F
QRPRASHKGXLPF

SEQ ID NO: 1209 - protein, 13 aa, Artificial Sequence
  source: /note="Description of Artificial Sequence: Synthetic peptide"
  source: /note="N-term Thiopropionyl(5K-mPEG)"
  MOD_RES (4)..(4): hArg
  MOD_RES (5)..(5): Cha
  MOD_RES (10)..(10): Oic
  MOD_RES (11)..(11): Nle
  MOD_RES (13)..(13): 4-Cl-F
QRPRASHKGXLPF

SEQ ID NO: 1210 - protein, 13 aa, Artificial Sequence
  source: /note="Description of Artificial Sequence: Synthetic peptide"
  source: /note="N-term Thiopropionyl(10K-mPEG)"
  MOD_RES (4)..(4): hArg
  MOD_RES (5)..(5): Cha
  MOD_RES (10)..(10): Oic
  MOD_RES (11)..(11): Nle
  MOD_RES (13)..(13): 4-Cl-F
QRPRASHKGXLPF

SEQ ID NO: 1211 - protein, 13 aa, Artificial Sequence
  source: /note="Description of Artificial Sequence: Synthetic peptide"
  source: /note="N-term Thiopropionyl(40K-mPEG)"
  MOD_RES (4)..(4): hArg
  MOD_RES (5)..(5): Cha
  MOD_RES (10)..(10): Oic
  MOD_RES (11)..(11): Nle
  MOD_RES (13)..(13): 4-Cl-F
QRPRASHKGXLPF

SEQ ID NO: 1212 - protein, 17 aa, Artificial Sequence
  source: /note="Description of Artificial Sequence: Synthetic peptide"
  source: /note="N-term Thiopropionyl(1K-mPEG)"
  MOD_RES (8)..(8): hArg
  MOD_RES (9)..(9): Cha
  MOD_RES (14)..(14): Oic
  MOD_RES (15)..(15): Nle
  MOD_RES (17)..(17): 4-Cl-F
KFRRQRPRASHKGXLPF

SEQ ID NO: 1213 - protein, 17 aa, Artificial Sequence
  source: /note="Description of Artificial Sequence: Synthetic peptide"
  source: /note="N-term Thiopropionyl(2K-mPEG)"
  MOD_RES (8)..(8): hArg
  MOD_RES (9)..(9): Cha
  MOD_RES (14)..(14): Oic
  MOD_RES (15)..(15): Nle
  MOD_RES (17)..(17): 4-Cl-F
KFRRQRPRASHKGXLPF

SEQ ID NO: 1214 - protein, 17 aa, Artificial Sequence
  source: /note="Description of Artificial Sequence: Synthetic peptide"
  source: /note="N-term Thiopropionyl(5K-mPEG)"
  MOD_RES (8)..(8): hArg
  MOD_RES (9)..(9): Cha
  MOD_RES (14)..(14): Oic
  MOD_RES (15)..(15): Nle
  MOD_RES (17)..(17): 4-Cl-F
KFRRQRPRASHKGXLPF

SEQ ID NO: 1215 - protein, 17 aa, Artificial Sequence
  source: /note="Description of Artificial Sequence: Synthetic peptide"
  source: /note="N-term Thiopropionyl(10K-mPEG)"
  MOD_RES (8)..(8): hArg
  MOD_RES (9)..(9): Cha
  MOD_RES (14)..(14): Oic
  MOD_RES (15)..(15): Nle
  MOD_RES (17)..(17): 4-Cl-F
KFRRQRPRASHKGXLPF

SEQ ID NO: 1216 - protein, 17 aa, Artificial Sequence
  source: /note="Description of Artificial Sequence: Synthetic peptide"
  source: /note="N-term Thiopropionyl(40K-mPEG)"
  MOD_RES (8)..(8): hArg
  MOD_RES (9)..(9): Cha
  MOD_RES (14)..(14): Oic
  MOD_RES (15)..(15): Nle
  MOD_RES (17)..(17): 4-Cl-F
KFRRQRPRASHKGXLPF

SEQ ID NO: 1217 - protein, 16 aa, Artificial Sequence
  source: /note="Description of Artificial Sequence: Synthetic peptide"
  source: /note="N-term Thiopropionyl(20K-mPEG)"
  MOD_RES (2)..(3): hArg
  MOD_RES (5)..(5): hArg
  MOD_RES (7)..(7): hArg
  MOD_RES (8)..(8): Cha
  MOD_RES (13)..(13): Oic
  MOD_RES (14)..(14): Nle
  MOD_RES (16)..(16): 4-Cl-F
FRRQRPRASHKGXLPF

SEQ ID NO: 1218 - protein, 17 aa, Artificial Sequence
  source: /note="Description of Artificial Sequence: Synthetic peptide"
  source: /note="N-term Thiopropionyl(20K-mPEG)"
  MOD_RES (1)..(1): Orn
  MOD_RES (3)..(4): hArg
  MOD_RES (6)..(6): hArg
  MOD_RES (8)..(8): hArg
  MOD_RES (9)..(9): Cha
  MOD_RES (14)..(14): Oic
  MOD_RES (15)..(15): Nle
  MOD_RES (17)..(17): 4-Cl-F
XFRRQRPRASHKGXLPF

SEQ ID NO: 1219 - protein, 17 aa, Artificial Sequence
  source: /note="Description of Artificial Sequence: Synthetic peptide"
  source: /note="N-term Thiopropionyl(20K-mPEG)"
  MOD_RES (1)..(1): Orn
  MOD_RES (3)..(4): hArg
  MOD_RES (6)..(6): Cit
  MOD_RES (8)..(8): hArg
  MOD_RES (9)..(9): Cha
  MOD_RES (14)..(14): Oic
  MOD_RES (15)..(15): Nle
  MOD_RES (17)..(17): 4-Cl-F
XFRRQXPRASHKGXLPF

SEQ ID NO: 1220 - protein, 16 aa, Artificial Sequence
  source: /note="Description of Artificial Sequence: Synthetic peptide"
  source: /note="N-term Thiopropionyl(20K-mPEG)"
  MOD_RES (2)..(3): hArg
  MOD_RES (5)..(5): Cit
  MOD_RES (7)..(7): hArg
  MOD_RES (8)..(8): Cha
  MOD_RES (13)..(13): Oic
  MOD_RES (14)..(14): Nle
  MOD_RES (16)..(16): 4-Cl-F
FRRQXPRASHKGXLPF

SEQ ID NO: 1221 - protein, 16 aa, Artificial Sequence
  source: /note="Description of Artificial Sequence: Synthetic peptide"
  source: /note="N-term Thiopropionyl(20K-mPEG)"
  MOD_RES (2)..(3): Cit
  MOD_RES (5)..(5): hArg
  MOD_RES (7)..(7): hArg
  MOD_RES (8)..(8): Cha
  MOD_RES (13)..(13): Oic
  MOD_RES (14)..(14): Nle
  MOD_RES (16)..(16): 4-Cl-F
FXXQRPRASHKGXLPF

SEQ ID NO: 1222 - protein, 17 aa, Artificial Sequence
  source: /note="Description of Artificial Sequence: Synthetic peptide"
  source: /note="N-term NPEG11"
  MOD_RES (8)..(8): hArg
  MOD_RES (9)..(9): Cha
  MOD_RES (14)..(14): Oic
  MOD_RES (15)..(15): Nle
  MOD_RES (17)..(17): 4-Cl-F
KFRRQRPRASHKGXLPF

SEQ ID NO: 1223 - protein, 18 aa, Artificial Sequence
  source: /note="Description of Artificial Sequence: Synthetic peptide"
  MOD_RES (1)..(1): Atz(PEG10)
  MOD_RES (9)..(9): hArg
  MOD_RES (10)..(10): Cha
  MOD_RES (15)..(15): Oic
  MOD_RES (16)..(16): Nle
  MOD_RES (18)..(18): 4-Cl-F
AKFRRQRPRASHKGXLPF

SEQ ID NO: 1224 - protein, 18 aa, Artificial Sequence
  source: /note="Description of Artificial Sequence: Synthetic peptide"
  MOD_RES (1)..(1): Atz(PEG10)
  MOD_RES (4)..(5): hArg
  MOD_RES (9)..(9): hArg
  MOD_RES (10)..(10): Cha
  MOD_RES (15)..(15): Oic
  MOD_RES (16)..(16): Nle
  MOD_RES (18)..(18): 4-Cl-F
AKFRRQRPRASHKGXLPF

SEQ ID NO: 1225 - protein, 18 aa, Artificial Sequence
  source: /note="Description of Artificial Sequence: Synthetic peptide"
  MOD_RES (1)..(1): Atz(PEG10)
  MOD_RES (4)..(5): hArg
  MOD_RES (7)..(7): hArg
  MOD_RES (9)..(9): hArg
  MOD_RES (10)..(10): Cha
  MOD_RES (15)..(15): Oic
  MOD_RES (16)..(16): Nle
  MOD_RES (18)..(18): 4-Cl-F
AKFRRQRPRASHKGXLPF

SEQ ID NO: 1226 - protein, 18 aa, Artificial Sequence
  source: /note="Description of Artificial Sequence: Synthetic peptide"
  MOD_RES (1)..(1): Atz(PEG10)
  MOD_RES (4)..(5): hArg
  MOD_RES (9)..(9): hArg
  MOD_RES (10)..(10): Cha
  MOD_RES (15)..(15): Oic
  MOD_RES (16)..(16): Nle
  MOD_RES (18)..(18): 4-Cl-F
AKFRRQQPRASHKGXLPF

SEQ ID NO: 1227 - protein, 18 aa, Artificial Sequence
  source: /note="Description of Artificial Sequence: Synthetic peptide"
  MOD_RES (1)..(1): Atz(PEG10)
  MOD_RES (4)..(5): hArg
  MOD_RES (7)..(7): Cit
  MOD_RES (9)..(9): hArg
  MOD_RES (10)..(10): Cha
  MOD_RES (15)..(15): Oic
  MOD_RES (16)..(16): Nle
  MOD_RES (18)..(18): 4-Cl-F
AKFRRQXPRASHKGXLPF

SEQ ID NO: 1228 - protein, 18 aa, Artificial Sequence
  source: /note="Description of Artificial Sequence: Synthetic peptide"
  MOD_RES (1)..(1): Atz(PEG10)
  MOD_RES (4)..(4): hArg
  MOD_RES (5)..(5): Cit
  MOD_RES (7)..(7): Cit
  MOD_RES (9)..(9): hArg
  MOD_RES (10)..(10): Cha
  MOD_RES (15)..(15): Oic
  MOD_RES (16)..(16): Nle
  MOD_RES (18)..(18): 4-Cl-F
AKFRXQXPRASHKGXLPF

SEQ ID NO: 1229 - protein, 18 aa, Artificial Sequence
  source: /note="Description of Artificial Sequence: Synthetic peptide"
  MOD_RES (1)..(1): Atz(PEG10)
  MOD_RES (4)..(5): Cit
  MOD_RES (7)..(7): hArg
  MOD_RES (9)..(9): hArg
  MOD_RES (10)..(10): Cha
  MOD_RES (15)..(15): Oic
  MOD_RES (16)..(16): Nle
  MOD_RES (18)..(18): 4-Cl-F
AKFXXQRPRASHKGXLPF

SEQ ID NO: 1230 - protein, 18 aa, Artificial Sequence
  source: /note="Description of Artificial Sequence: Synthetic peptide"
  MOD_RES (1)..(1): Atz(PEG10)
  MOD_RES (4)..(5): Cit
  MOD_RES (7)..(7): Cit
  MOD_RES (9)..(9): hArg
  MOD_RES (10)..(10): Cha
  MOD_RES (15)..(15): Oic
  MOD_RES (16)..(16): Nle
  MOD_RES (18)..(18): 4-Cl-F
AKFXXQXPRASHKGXLPF

SEQ ID NO: 1231 - protein, 18 aa, Artificial Sequence
  source: /note="Description of Artificial Sequence: Synthetic peptide"
  MOD_RES (1)..(1): Atz(PEG10)
  MOD_RES (2)..(2): Orn
  MOD_RES (9)..(9): hArg
  MOD_RES (10)..(10): Cha
  MOD_RES (15)..(15): Oic
  MOD_RES (16)..(16): Nle
  MOD_RES (18)..(18): 4-Cl-F
AXFRRQRPRASHKGXLPF

SEQ ID NO: 1232 - protein, 18 aa, Artificial Sequence
  source: /note="Description of Artificial Sequence: Synthetic peptide"
  MOD_RES (1)..(1): Atz(PEG10)
  MOD_RES (2)..(2): Orn
  MOD_RES (4)..(5): hArg
  MOD_RES (7)..(7): hArg
  MOD_RES (9)..(9): hArg
  MOD_RES (10)..(10): Cha
  MOD_RES (15)..(15): Oic
  MOD_RES (16)..(16): Nle
  MOD_RES (18)..(18): 4-Cl-F
AXFRRQRPRASHKGXLPF

SEQ ID NO: 1233 - protein, 17 aa, Artificial Sequence
  source: /note="Description of Artificial Sequence: Synthetic peptide"
  MOD_RES (1)..(1): Atz(PEG10)
  MOD_RES (8)..(8): hArg
  MOD_RES (9)..(9): Cha
  MOD_RES (14)..(14): Oic
  MOD_RES (15)..(15): Nle
  MOD_RES (17)..(17): 4-Cl-F
AFRRQRPRASHKGXLPF

SEQ ID NO: 1234 - protein, 14 aa, Artificial Sequence
  source: /note="Description of Artificial Sequence: Synthetic peptide"
  MOD_RES (1)..(1): Atz(PEG10)
  MOD_RES (5)..(5): hArg
  MOD_RES (6)..(6): Cha
  MOD_RES (11)..(11): Oic
  MOD_RES (12)..(12): Nle
  MOD_RES (14)..(14): 4-Cl-F
ALRPRASHKGXLPF

SEQ ID NO: 1235 - protein, 12 aa, Artificial Sequence
  source: /note="Description of Artificial Sequence: Synthetic peptide"
  source: /note="N-term Palmitoyl"
  MOD_RES (4)..(4): hArg
  MOD_RES (5)..(5): Cha
  MOD_RES (11)..(11): Nle
  MOD_RES (12)..(12): 4-Cl-F
LRPRAFHKGPLF

SEQ ID NO: 1236 - protein, 12 aa, Artificial Sequence
  source: /note="Description of Artificial Sequence: Synthetic peptide"
  source: /note="N-term Palmitoyl"
  MOD_RES (4)..(4): hArg
  MOD_RES (5)..(5): Cha
  MOD_RES (11)..(11): Nle
  MOD_RES (12)..(12): D-1Nal
LRPRAFHKPPLA

SEQ ID NO: 1237 - protein, 12 aa, Artificial Sequence
  source: /note="Description of Artificial Sequence: Synthetic peptide"
  source: /note="N-term Palmitoyl"
  MOD_RES (4)..(4): hArg
  MOD_RES (5)..(5): Cha
  MOD_RES (11)..(11): Nle
  MOD_RES (12)..(12): 4-Cl-F
LRPRASHKGPLF

SEQ ID NO: 1238 - protein, 12 aa, Artificial Sequence
  source: /note="Description of Artificial Sequence: Synthetic peptide"
  source: /note="N-term Palmitoyl"
  MOD_RES (4)..(4): hArg
  MOD_RES (5)..(5): NMeLeu
  MOD_RES (8)..(8): 1-Nal
  MOD_RES (10)..(10): 1-Nal
  MOD_RES (11)..(11): Nle
  MOD_RES (12)..(12): 4-Cl-F
  source: /note="C-term Amide"
LRPRLFAAGALF

SEQ ID NO: 1239 - protein, 12 aa, Artificial Sequence
  source: /note="Description of Artificial Sequence: Synthetic peptide"
  source: /note="N-term Palmitoyl"
  MOD_RES (4)..(4): hArg
  MOD_RES (5)..(5): NMeLeu
  MOD_RES (8)..(8): 1-Nal
  MOD_RES (10)..(10): Oic
  MOD_RES (11)..(11): Nle
  MOD_RES (12)..(12): 4-Cl-F
  source: /note="C-term Amide"
LRPRLFAAGXLF

SEQ ID NO: 1240 - protein, 12 aa, Artificial Sequence
  source: /note="Description of Artificial Sequence: Synthetic peptide"
  source: /note="N-term Palmitoyl"
  MOD_RES (4)..(4): hArg
  MOD_RES (5)..(5): NMeLeu
  MOD_RES (8)..(8): 1-Nal
  MOD_RES (10)..(10): 1-Nal
  MOD_RES (11)..(11): Nle
  MOD_RES (12)..(12): 4-Cl-F
  source: /note="C-term Amide"
LRPRLFAAGALF

SEQ ID NO: 1241 - protein, 12 aa, Artificial Sequence
  source: /note="Description of Artificial Sequence: Synthetic peptide"
  MOD_RES (1)..(1): PyroGlu
  MOD_RES (4)..(4): hArg
  MOD_RES (5)..(5): Cha
  MOD_RES (11)..(11): Nle
  MOD_RES (12)..(12): 4-F-F
ERPRASHKGPLF

SEQ ID NO: 1242 - protein, 12 aa, Artificial Sequence
  source: /note="Description of Artificial Sequence: Synthetic peptide"
  MOD_RES (1)..(1): PyroGlu
  MOD_RES (4)..(4): hArg
  MOD_RES (5)..(5): Cha
  MOD_RES (11)..(11): Nle
  MOD_RES (12)..(12): 4-Me-F
ERPRASHKGPLF

SEQ ID NO: 1243 - protein, 12 aa, Artificial Sequence
  source: /note="Description of Artificial Sequence: Synthetic peptide"
  MOD_RES (1)..(1): PyroGlu
  MOD_RES (4)..(4): hArg
  MOD_RES (5)..(5): Cha
  MOD_RES (11)..(11): Nle
  MOD_RES (12)..(12): D-Bip
ERPRASHKGPLF

SEQ ID NO: 1244 - protein, 12 aa, Artificial Sequence
  source: /note="Description of Artificial Sequence: Synthetic peptide"
  MOD_RES (1)..(1): PyroGlu
  MOD_RES (4)..(4): hArg
  MOD_RES (5)..(5): Cha
  MOD_RES (11)..(11): Nle
  MOD_RES (12)..(12): D-Tyr
ERPRASHKGPLY

SEQ ID NO: 1245 - protein, 12 aa, Artificial Sequence
  source: /note="Description of Artificial Sequence: Synthetic peptide"
  MOD_RES (1)..(1): PyroGlu
  MOD_RES (5)..(5): Cha
  MOD_RES (11)..(11): Nle
ERPRASHKGPLF

SEQ ID NO: 1246 - protein, 12 aa, Artificial Sequence
  source: /note="Description of Artificial Sequence: Synthetic peptide"
  MOD_RES (1)..(1): PyroGlu
  MOD_RES (4)..(4): hArg
  MOD_RES (5)..(5): NMeLeu
  MOD_RES (11)..(11): Nle
ERPRLSHKGPLF

SEQ ID NO: 1247 - protein, 12 aa, Artificial Sequence
  source: /note="Description of Artificial Sequence: Synthetic peptide"
  MOD_RES (1)..(1): PyroGlu
  MOD_RES (4)..(4): hArg
  MOD_RES (5)..(5): Cha
  MOD_RES (11)..(11): pI-Phe
ERPRASHKGPFF

SEQ ID NO: 1248 - protein, 12 aa, Artificial Sequence
  source: /note="Description of Artificial Sequence: Synthetic peptide"
  MOD_RES (1)..(1): PyroGlu
  MOD_RES (5)..(5): Cha
  MOD_RES (11)..(11): pI-Phe
ERPRASHKGPFF

SEQ ID NO: 1249 - protein, 12 aa, Artificial Sequence
  source: /note="Description of Artificial Sequence: Synthetic peptide"
  MOD_RES (1)..(1): PyroGlu
  MOD_RES (4)..(4): hArg
  MOD_RES (5)..(5): NMeLeu
  MOD_RES (11)..(11): pI-Phe
ERPRLSHKGPFF

SEQ ID NO: 1250 - protein, 12 aa, Artificial Sequence
  source: /note="Description of Artificial Sequence: Synthetic peptide"
  MOD_RES (1)..(1): PyroGlu
  MOD_RES (4)..(4): hArg
  MOD_RES (5)..(5): Cha
  MOD_RES (11)..(11): Nle
  MOD_RES (12)..(12): pI-Phe
ERPRASHKGPLF

SEQ ID NO: 1251 - protein, 12 aa, Artificial Sequence
  source: /note="Description of Artificial Sequence: Synthetic peptide"
  MOD_RES (1)..(1): PyroGlu
  MOD_RES (4)..(4): hArg
  MOD_RES (5)..(5): Cha
  MOD_RES (11)..(11): Nle
  MOD_RES (12)..(12): D-1Nal
  source: /note="C-term Amide"
ERPRASHKPPLA

SEQ ID NO: 1252 - protein, 12 aa, Artificial Sequence
  source: /note="Description of Artificial Sequence: Synthetic peptide"
  MOD_RES (1)..(1): PyroGlu
  MOD_RES (4)..(4): hArg
  MOD_RES (5)..(5): Cha
  MOD_RES (11)..(11): Nle
  MOD_RES (12)..(12): 4-Cl-F
ERPRAFHKPPLF

SEQ ID NO: 1253 - protein, 12 aa, Artificial Sequence
  source: /note="Description of Artificial Sequence: Synthetic peptide"
  MOD_RES (1)..(1): PyroGlu
  MOD_RES (4)..(4): hArg
  MOD_RES (5)..(5): Cha
  MOD_RES (11)..(11): Nle
  MOD_RES (12)..(12): 4-Cl-F
ERPRAFHKGPLF

SEQ ID NO: 1254 - protein, 12 aa, Artificial Sequence
  source: /note="Description of Artificial Sequence: Synthetic peptide"
  MOD_RES (1)..(1): PyroGlu
  MOD_RES (4)..(4): hArg
  MOD_RES (5)..(5): Cha
  MOD_RES (11)..(11): Nle
  MOD_RES (12)..(12): 4-Cl-F
ERPRASHKPPLF

SEQ ID NO: 1255 - protein, 12 aa, Artificial Sequence
  source: /note="Description of Artificial Sequence: Synthetic peptide"
  MOD_RES (1)..(1): PyroGlu
  MOD_RES (4)..(4): hArg
  MOD_RES (5)..(5): Cha
  MOD_RES (11)..(11): Nle
  MOD_RES (12)..(12): D-1Nal
ERPRAFHKPPLA

SEQ ID NO: 1256 - protein, 12 aa, Artificial Sequence
  source: /note="Description of Artificial Sequence: Synthetic peptide"
  MOD_RES (1)..(1): PyroGlu
  MOD_RES (4)..(4): hArg
  MOD_RES (5)..(5): Cha
  MOD_RES (11)..(11): Nle
  MOD_RES (12)..(12): D-1Nal
ERPRAFHKGPLA

SEQ ID NO: 1257 - protein, 12 aa, Artificial Sequence
  source: /note="Description of Artificial Sequence: Synthetic peptide"
  MOD_RES (1)..(1): PyroGlu
  MOD_RES (4)..(4): hArg
  MOD_RES (5)..(5): Cha
  MOD_RES (11)..(11): Nle
  MOD_RES (12)..(12): D-1Nal
  source: /note="C-term Amide"
ERPRAFHKPPLA

SEQ ID NO: 1258 - protein, 12 aa, Artificial Sequence
  source: /note="Description of Artificial Sequence: Synthetic peptide"
  MOD_RES (1)..(1): PyroGlu
  MOD_RES (4)..(4): hArg
  MOD_RES (5)..(5): Cha
  MOD_RES (11)..(11): Nle
  MOD_RES (12)..(12): D-1Nal
  source: /note="C-term Amide"
ERPRAFHKGPLA

SEQ ID NO: 1259 - protein, 12 aa, Artificial Sequence
  source: /note="Description of Artificial Sequence: Synthetic peptide"
  MOD_RES (1)..(1): PyroGlu
  MOD_RES (4)..(4): hArg
  MOD_RES (5)..(5): Cha
  MOD_RES (11)..(11): Nle
  MOD_RES (12)..(12): 4-Cl-F
  source: /note="C-term Amide"
ERPRAFHKPPLF

SEQ ID NO: 1260 - protein, 12 aa, Artificial Sequence
  source: /note="Description of Artificial Sequence: Synthetic peptide"
  MOD_RES (1)..(1): PyroGlu
  MOD_RES (4)..(4): hArg
  MOD_RES (5)..(5): Cha
  MOD_RES (11)..(11): Nle
  MOD_RES (12)..(12): 4-Cl-F
  source: /note="C-term Amide"
ERPRAFHKGPLF

SEQ ID NO: 1261 - protein, 12 aa, Artificial Sequence
  source: /note="Description of Artificial Sequence: Synthetic peptide"
  MOD_RES (1)..(1): PyroGlu
  MOD_RES (4)..(4): hArg
  MOD_RES (5)..(5): Cha
  MOD_RES (11)..(11): Nle
  MOD_RES (12)..(12): D-Phe
  source: /note="C-term Amide"
ERPRASHKGPLF

SEQ ID NO: 1262 - protein, 12 aa, Artificial Sequence
  source: /note="Description of Artificial Sequence: Synthetic peptide"
  MOD_RES (1)..(1): PyroGlu
  MOD_RES (4)..(4): hArg
  MOD_RES (5)..(5): Cha
  MOD_RES (11)..(11): Nle
  MOD_RES (12)..(12): D-Trp
  source: /note="C-term Amide"
ERPRASHKGPLW

SEQ ID NO: 1263 - protein, 12 aa, Artificial Sequence
  source: /note="Description of Artificial Sequence: Synthetic peptide"
  MOD_RES (1)..(1): PyroGlu
  MOD_RES (4)..(4): hArg
  MOD_RES (5)..(5): Cha
  MOD_RES (11)..(11): Nle
  MOD_RES (12)..(12): D-2Nal
  source: /note="C-term Amide"
ERPRASHKGPLA

SEQ ID NO: 1264 - protein, 12 aa, Artificial Sequence
  source: /note="Description of Artificial Sequence: Synthetic peptide"
  MOD_RES (1)..(1): PyroGlu
  MOD_RES (4)..(4): hArg
  MOD_RES (5)..(5): NMeLeu
  MOD_RES (6)..(6): NMePhe
  MOD_RES (10)..(10): 1-Nal
  MOD_RES (11)..(11): Nle
  MOD_RES (12)..(12): D-Phe
ERPRLFAKGALF

SEQ ID NO: 1265 - protein, 12 aa, Artificial Sequence
  source: /note="Description of Artificial Sequence: Synthetic peptide"
  MOD_RES (1)..(1): PyroGlu
  MOD_RES (4)..(4): hArg
  MOD_RES (5)..(5): NMeLeu
  MOD_RES (10)..(10): 1-Nal
  MOD_RES (11)..(11): Nle
  MOD_RES (12)..(12): D-Phe
ERPRLFHKGALF

SEQ ID NO: 1266 - protein, 12 aa, Artificial Sequence
  source: /note="Description of Artificial Sequence: Synthetic peptide"
  MOD_RES (1)..(1): PyroGlu
  MOD_RES (4)..(4): hArg
  MOD_RES (5)..(5): Cha
  MOD_RES (11)..(11): Nle
  MOD_RES (12)..(12): 4-Cl-F
  source: /note="C-term Amide"
ERPRASHKGPLF

SEQ ID NO: 1267 - protein, 12 aa, Artificial Sequence
  source: /note="Description of Artificial Sequence: Synthetic peptide"
  MOD_RES (1)..(1): PyroGlu
  MOD_RES (4)..(4): hArg
  MOD_RES (5)..(5): Cha
  MOD_RES (10)..(10): 1-Nal
  MOD_RES (11)..(11): Nle
  MOD_RES (12)..(12): 4-Cl-F
  source: /note="C-term Amide"
ERPRASHKGALF

SEQ ID NO: 1268 - protein, 12 aa, Artificial Sequence
  source: /note="Description of Artificial Sequence: Synthetic peptide"
  MOD_RES (1)..(1): PyroGlu
  MOD_RES (4)..(4): hArg
  MOD_RES (5)..(5): Cha
  MOD_RES (10)..(10): 1-Nal
  MOD_RES (11)..(11): Nle
  MOD_RES (12)..(12): 4-Cl-F
  source: /note="C-term Amide"
ERPRAFHKGALF

SEQ ID NO: 1269 - protein, 12 aa, Artificial Sequence
  source: /note="Description of Artificial Sequence: Synthetic peptide"
  MOD_RES (1)..(1): PyroGlu
  MOD_RES (4)..(4): hArg
  MOD_RES (5)..(5): Cha
  MOD_RES (11)..(11): Nle
  MOD_RES (12)..(12): 4-Cl-F
  source: /note="C-term Amide"
ERPRAFHKGPLF

SEQ ID NO: 1270 - protein, 12 aa, Artificial Sequence
  source: /note="Description of Artificial Sequence: Synthetic peptide"
  MOD_RES (1)..(1): PyroGlu
  MOD_RES (4)..(4): hArg
  MOD_RES (5)..(5): Cha
  MOD_RES (10)..(10): 1-Nal
  MOD_RES (11)..(11): Nle
  MOD_RES (12)..(12): 4-Cl-F
  source: /note="C-term Amide"
ERPRASAKGALF

SEQ ID NO: 1271 - protein, 12 aa, Artificial Sequence
  source: /note="Description of Artificial Sequence: Synthetic peptide"
  MOD_RES (1)..(1): PyroGlu
  MOD_RES (4)..(4): hArg
  MOD_RES (5)..(5): Cha
  MOD_RES (10)..(10): 1-Nal
  MOD_RES (11)..(11): Nle
  MOD_RES (12)..(12): 4-Cl-F
  source: /note="C-term Amide"
ERPRAFAKGALF

SEQ ID NO: 1272 - protein, 12 aa, Artificial Sequence
  source: /note="Description of Artificial Sequence: Synthetic peptide"
  MOD_RES (1)..(1): PyroGlu
  MOD_RES (4)..(4): hArg
  MOD_RES (5)..(5): Cha
  MOD_RES (6)..(6): NMePhe
  MOD_RES (7)..(7): 2-Nal
  MOD_RES (10)..(10): 1-Nal
  MOD_RES (11)..(11): Nle
  MOD_RES (12)..(12): 4-Cl-F
ERPRAFAKGALF

SEQ ID NO: 1273 - protein, 12 aa, Artificial Sequence
  source: /note="Description of Artificial Sequence: Synthetic peptide"
  MOD_RES (1)..(1): PyroGlu
  MOD_RES (4)..(4): hArg
  MOD_RES (5)..(5): Cha
  MOD_RES (11)..(11): Nle
  MOD_RES (12)..(12): 4-Cl-F
  source: /note="C-term Amide"
ERPRAFAKGPLF

SEQ ID NO: 1274 - protein, 12 aa, Artificial Sequence
  source: /note="Description of Artificial Sequence: Synthetic peptide"
  MOD_RES (1)..(1): PyroGlu
  MOD_RES (4)..(4): hArg
  MOD_RES (5)..(5): Cha
  MOD_RES (7)..(7): 1-Nal
  MOD_RES (10)..(10): 1-Nal
  MOD_RES (11)..(11): Nle
  MOD_RES (12)..(12): 4-Cl-F
  source: /note="C-term Amide"
ERPRASAKGALF

SEQ ID NO: 1275 - protein, 12 aa, Artificial Sequence
  source: /note="Description of Artificial Sequence: Synthetic peptide"
  MOD_RES (1)..(1): PyroGlu
  MOD_RES (4)..(4): hArg
  MOD_RES (5)..(5): Cha
  MOD_RES (7)..(7): 1-Nal
  MOD_RES (10)..(10): 1-Nal
  MOD_RES (11)..(11): Nle
  MOD_RES (12)..(12): 4-Cl-F
  source: /note="C-term Amide"
ERPRAFAKGALF

SEQ ID NO: 1276 - protein, 12 aa, Artificial Sequence
  source: /note="Description of Artificial Sequence: Synthetic peptide"
  MOD_RES (1)..(1): PyroGlu
  MOD_RES (4)..(4): hArg
  MOD_RES (5)..(5): Cha
  MOD_RES (7)..(7): 1-Nal
  MOD_RES (11)..(11): Nle
  MOD_RES (12)..(12): 4-Cl-F
  source: /note="C-term Amide"
ERPRAFAKGPLF

SEQ ID NO: 1277 - protein, 12 aa, Artificial Sequence
  source: /note="Description of Artificial Sequence: Synthetic peptide"
  MOD_RES (1)..(1): PyroGlu
  MOD_RES (4)..(4): hArg
  MOD_RES (5)..(5): Cha
  MOD_RES (6)..(6): NMePhe
  MOD_RES (7)..(7): 1-Nal
  MOD_RES (10)..(10): 1-Nal
  MOD_RES (11)..(11): Nle
  MOD_RES (12)..(12): 4-Cl-F
  source: /note="C-term Amide"
ERPRAFAKGALF

SEQ ID NO: 1278 - protein, 12 aa, Artificial Sequence
  source: /note="Description of Artificial Sequence: Synthetic peptide"
  MOD_RES (1)..(1): PyroGlu
  MOD_RES (4)..(4): hArg
  MOD_RES (5)..(5): Cha
  MOD_RES (6)..(6): NMePhe
  MOD_RES (7)..(7): 1-Nal
  MOD_RES (10)..(10): 1-Nal
  MOD_RES (11)..(11): Nle
  MOD_RES (12)..(12): 4-Cl-F
  source: /note="C-term Amide"
ERPRAFAKGALF

SEQ ID NO: 1279 - protein, 12 aa, Artificial Sequence
  source: /note="Description of Artificial Sequence: Synthetic peptide"
  MOD_RES (1)..(1): PyroGlu
  MOD_RES (4)..(4): hArg
  MOD_RES (5)..(5): Cha
  MOD_RES (6)..(6): NMePhe
  MOD_RES (7)..(7): 1-Nal
  MOD_RES (11)..(11): Nle
  MOD_RES (12)..(12): 4-Cl-F
  source: /note="C-term Amide"
ERPRAFAKGPLF

SEQ ID NO: 1280 - protein, 12 aa, Artificial Sequence
  source: /note="Description of Artificial Sequence: Synthetic peptide"
  MOD_RES (1)..(1): PyroGlu
  MOD_RES (4)..(4): hArg
  MOD_RES (5)..(5): Cha
  MOD_RES (6)..(6): NMePhe
  MOD_RES (10)..(10): 1-Nal
  MOD_RES (11)..(11): Nle
  MOD_RES (12)..(12): 4-Cl-F
  source: /note="C-term Amide"
ERPRAFAKGALF

SEQ ID NO: 1281 - protein, 12 aa, Artificial Sequence
  source: /note="Description of Artificial Sequence: Synthetic peptide"
  MOD_RES (1)..(1): PyroGlu
  MOD_RES (4)..(4): hArg
  MOD_RES (5)..(5): Cha
  MOD_RES (6)..(6): NMePhe
  MOD_RES (10)..(10): 1-Nal
  MOD_RES (11)..(11): Nle
  MOD_RES (12)..(12): 4-Cl-F
  source: /note="C-term Amide"
ERPRAFAKGALF

SEQ ID NO: 1282 - protein, 12 aa, Artificial Sequence
  source: /note="Description of Artificial Sequence: Synthetic peptide"
  MOD_RES (1)..(1): PyroGlu
  MOD_RES (4)..(4): hArg
  MOD_RES (5)..(5): Cha
  MOD_RES (6)..(6): NMePhe
  MOD_RES (11)..(11): Nle
  MOD_RES (12)..(12): 4-Cl-F
  source: /note="C-term Amide"
ERPRAFAKGPLF

SEQ ID NO: 1283 - protein, 12 aa, Artificial Sequence
  source: /note="Description of Artificial Sequence: Synthetic peptide"
  MOD_RES (1)..(1): PyroGlu
  MOD_RES (4)..(4): hArg
  MOD_RES (5)..(5): Cha
  MOD_RES (7)..(7): 2-Nal
  MOD_RES (10)..(10): 1-Nal
  MOD_RES (11)..(11): Nle
  MOD_RES (12)..(12): 4-Cl-F
  source: /note="C-term Amide"
ERPRASAKGALF

SEQ ID NO: 1284 - protein, 12 aa, Artificial Sequence
  source: /note="Description of Artificial Sequence: Synthetic peptide"
  MOD_RES (1)..(1): PyroGlu
  MOD_RES (4)..(4): hArg
  MOD_RES (5)..(5): Cha
  MOD_RES (7)..(7): 2-Nal
  MOD_RES (10)..(10): 1-Nal
  MOD_RES (11)..(11): Nle
  MOD_RES (12)..(12): 4-Cl-F
  source: /note="C-term Amide"
ERPRAFAKGALF

SEQ ID NO: 1285 - protein, 12 aa, Artificial Sequence
  source: /note="Description of Artificial Sequence: Synthetic peptide"
  MOD_RES (1)..(1): PyroGlu
  MOD_RES (4)..(4): hArg
  MOD_RES (5)..(5): Cha
  MOD_RES (7)..(7): 2-Nal
  MOD_RES (11)..(11): Nle
  MOD_RES (12)..(12): 4-Cl-F
  source: /note="C-term Amide"
ERPRAFAKGPLF

SEQ ID NO: 1286 - protein, 12 aa, Artificial Sequence
  source: /note="Description of Artificial Sequence: Synthetic peptide"
  MOD_RES (1)..(1): PyroGlu
  MOD_RES (4)..(4): hArg
  MOD_RES (5)..(5): Cha
  MOD_RES (6)..(6): NMePhe
  MOD_RES (7)..(7): 2-Nal
  MOD_RES (10)..(10): 1-Nal
  MOD_RES (11)..(11): Nle
  MOD_RES (12)..(12): 4-Cl-F
  source: /note="C-term Amide"
ERPRAFAKGALF

SEQ ID NO: 1287 - protein, 12 aa, Artificial Sequence
  source: /note="Description of Artificial Sequence: Synthetic peptide"
  MOD_RES (1)..(1): PyroGlu
  MOD_RES (4)..(4): hArg
  MOD_RES (5)..(5): Cha
  MOD_RES (6)..(6): NMePhe
  MOD_RES (7)..(7): 2-Nal
  MOD_RES (10)..(10): 1-Nal
  MOD_RES (11)..(11): Nle
  MOD_RES (12)..(12): 4-Cl-F
  source: /note="C-term Amide"
ERPRAFAKGALF

SEQ ID NO: 1288 - protein, 12 aa, Artificial Sequence
  source: /note="Description of Artificial Sequence: Synthetic peptide"
  MOD_RES (1)..(1): PyroGlu
  MOD_RES (4)..(4): hArg
  MOD_RES (5)..(5): Cha
  MOD_RES (6)..(6): NMePhe
  MOD_RES (7)..(7): 2-Nal
  MOD_RES (11)..(11): Nle
  MOD_RES (12)..(12): 4-Cl-F
  source: /note="C-term Amide"
ERPRAFAKGPLF

SEQ ID NO: 1289 - protein, 12 aa, Artificial Sequence
  source: /note="Description of Artificial Sequence: Synthetic peptide"
  MOD_RES (1)..(1): PyroGlu
  MOD_RES (4)..(4): hArg
  MOD_RES (5)..(5): NMeLeu
  MOD_RES (7)..(7): 1-Nal
  MOD_RES (10)..(10): 1-Nal
  MOD_RES (11)..(11): Nle
  MOD_RES (12)..(12): D-Phe
  source: /note="C-term Amide"
ERPRLFAKGALF

SEQ ID NO: 1290 - protein, 12 aa, Artificial Sequence
  source: /note="Description of Artificial Sequence: Synthetic peptide"
  MOD_RES (1)..(1): PyroGlu
  MOD_RES (4)..(4): hArg
  MOD_RES (5)..(5): NMeLeu
  MOD_RES (7)..(7): 2-Nal
  MOD_RES (10)..(10): 1-Nal
  MOD_RES (11)..(11): Nle
  MOD_RES (12)..(12): D-Phe
  source: /note="C-term Amide"
ERPRLFAKGALF

SEQ ID NO: 1291 - protein, 12 aa, Artificial Sequence
  source: /note="Description of Artificial Sequence: Synthetic peptide"
  MOD_RES (1)..(1): PyroGlu
  MOD_RES (4)..(4): hArg
  MOD_RES (5)..(5): Cha
  MOD_RES (6)..(6): NMePhe
  MOD_RES (7)..(7): 1-Nal
  MOD_RES (10)..(10): 1-Nal
  MOD_RES (11)..(11): Nle
  MOD_RES (12)..(12): 4-Cl-F
ERPRAFAKGALF

SEQ ID NO: 1292 - protein, 12 aa, Artificial Sequence
  source: /note="Description of Artificial Sequence: Synthetic peptide"
  MOD_RES (1)..(1): PyroGlu
  MOD_RES (4)..(4): hArg
  MOD_RES (5)..(5): NMeLeu
  MOD_RES (11)..(11): Nle
  MOD_RES (12)..(12): D-Phe
  source: /note="C-term Amide"
ERPRLSHKGPLF

SEQ ID NO: 1293 - protein, 12 aa, Artificial Sequence
  source: /note="Description of Artificial Sequence: Synthetic peptide"
  MOD_RES (1)..(1): PyroGlu
  MOD_RES (4)..(4): hArg
  MOD_RES (5)..(5): NMeLeu
  MOD_RES (10)..(10): 1-Nal
  MOD_RES (11)..(11): Nle
  MOD_RES (12)..(12): D-Phe
  source: /note="C-term Amide"
ERPRLSHKGALF

SEQ ID NO: 1294 - protein, 12 aa, Artificial Sequence
  source: /note="Description of Artificial Sequence: Synthetic peptide"
  MOD_RES (1)..(1): PyroGlu
  MOD_RES (4)..(4): hArg
  MOD_RES (5)..(5): NMeLeu
  MOD_RES (10)..(10): 1-Nal
  MOD_RES (11)..(11): Nle
  MOD_RES (12)..(12): D-Phe
  source: /note="C-term Amide"
ERPRLFHKGALF

SEQ ID NO: 1295 - protein, 12 aa, Artificial Sequence
  source: /note="Description of Artificial Sequence: Synthetic peptide"
  MOD_RES (1)..(1): PyroGlu
  MOD_RES (4)..(4): hArg
  MOD_RES (5)..(5): NMeLeu
  MOD_RES (11)..(11): Nle
  MOD_RES (12)..(12): D-Phe
  source: /note="C-term Amide"
ERPRLFHKGPLF

SEQ ID NO: 1296 - protein, 12 aa, Artificial Sequence
  source: /note="Description of Artificial Sequence: Synthetic peptide"
  MOD_RES (1)..(1): PyroGlu
  MOD_RES (4)..(4): hArg
  MOD_RES (5)..(5): NMeLeu
  MOD_RES (10)..(10): 1-Nal
  MOD_RES (11)..(11): Nle
  MOD_RES (12)..(12): D-Phe
  source: /note="C-term Amide"
ERPRLSAKGALF

SEQ ID NO: 1297 - protein, 12 aa, Artificial Sequence
  source: /note="Description of Artificial Sequence: Synthetic peptide"
  MOD_RES (1)..(1): PyroGlu
  MOD_RES (4)..(4): hArg
  MOD_RES (5)..(5): NMeLeu
  MOD_RES (10)..(10): 1-Nal
  MOD_RES (11)..(11): Nle
  MOD_RES (12)..(12): D-Phe
  source: /note="C-term Amide"
ERPRLFAKGALF

SEQ ID NO: 1298 - protein, 12 aa, Artificial Sequence
  source: /note="Description of Artificial Sequence: Synthetic peptide"
  MOD_RES (1)..(1): PyroGlu
  MOD_RES (4)..(4): hArg
  MOD_RES (5)..(5): NMeLeu
  MOD_RES (8)..(8): 1-Nal
  MOD_RES (10)..(10): 1-Nal
  MOD_RES (11)..(11): Nle
  MOD_RES (12)..(12): D-Phe
  source: /note="C-term Amide"
ERPRLFAAGALF

SEQ ID NO: 1299 - protein, 12 aa, Artificial Sequence
  source: /note="Description of Artificial Sequence: Synthetic peptide"
  MOD_RES (1)..(1): PyroGlu
  MOD_RES (4)..(4): hArg
  MOD_RES (5)..(5): NMeLeu
  MOD_RES (11)..(11): Nle
  MOD_RES (12)..(12): D-Phe
  source: /note="C-term Amide"
ERPRLFAKGPLF

SEQ ID NO: 1300 - protein, 12 aa, Artificial Sequence
  source: /note="Description of Artificial Sequence: Synthetic peptide"
  MOD_RES (1)..(1): PyroGlu
  MOD_RES (4)..(4): hArg
  MOD_RES (5)..(5): NMeLeu
  MOD_RES (7)..(7): 1-Nal
  MOD_RES (10)..(10): 1-Nal
  MOD_RES (11)..(11): Nle
  MOD_RES (12)..(12): D-Phe
  source: /note="C-term Amide"
ERPRLSAKGALF

SEQ ID NO: 1301 - protein, 12 aa, Artificial Sequence
  source: /note="Description of Artificial Sequence: Synthetic peptide"
  MOD_RES (1)..(1): PyroGlu
  MOD_RES (4)..(4): hArg
  MOD_RES (5)..(5): NMeLeu
  MOD_RES (7)..(7): 1-Nal
  MOD_RES (10)..(10): 1-Nal
  MOD_RES (11)..(11): Nle
  MOD_RES (12)..(12): D-Phe
  source: /note="C-term Amide"
ERPRLFAKGALF

SEQ ID NO: 1302 - protein, 12 aa, Artificial Sequence
  source: /note="Description of Artificial Sequence: Synthetic peptide"
  MOD_RES (1)..(1): PyroGlu
  MOD_RES (4)..(4): hArg
  MOD_RES (5)..(5): NMeLeu
  MOD_RES (7)..(7): 1-Nal
  MOD_RES (11)..(11): Nle
  MOD_RES (12)..(12): D-Phe
  source: /note="C-term Amide"
ERPRLFAKGPLF

SEQ ID NO: 1303 - protein, 12 aa, Artificial Sequence
  source: /note="Description of Artificial Sequence: Synthetic peptide"
  MOD_RES (1)..(1): PyroGlu
  MOD_RES (4)..(4): hArg
  MOD_RES (5)..(5): NMeLeu
  MOD_RES (6)..(6): NMePhe
  MOD_RES (7)..(7): 1-Nal
  MOD_RES (11)..(11): Nle
  MOD_RES (12)..(12): D-Phe
  source: /note="C-term Amide"
ERPRLFAKGPLF

SEQ ID NO: 1304 - protein, 12 aa, Artificial Sequence
  source: /note="Description of Artificial Sequence: Synthetic peptide"
  MOD_RES (1)..(1): PyroGlu
  MOD_RES (4)..(4): hArg
  MOD_RES (5)..(5): NMeLeu
  MOD_RES (6)..(6): NMePhe
  MOD_RES (10)..(10): 1-Nal
  MOD_RES (11)..(11): Nle
  MOD_RES (12)..(12): D-Phe
  source: /note="C-term Amide"
ERPRLFAKGALF

SEQ ID NO: 1305 - protein, 12 aa, Artificial Sequence
  source: /note="Description of Artificial Sequence: Synthetic peptide"
  MOD_RES (1)..(1): PyroGlu
  MOD_RES (4)..(4): hArg
  MOD_RES (5)..(5): NMeLeu
  MOD_RES (6)..(6): NMePhe
  MOD_RES (10)..(10): 1-Nal
  MOD_RES (11)..(11): Nle
  MOD_RES (12)..(12): D-Phe
  source: /note="C-term Amide"
ERPRLFAKGALF

SEQ ID NO: 1306 - protein, 12 aa, Artificial Sequence
  source: /note="Description of Artificial Sequence: Synthetic peptide"
  MOD_RES (1)..(1): PyroGlu
  MOD_RES (4)..(4): hArg
  MOD_RES (5)..(5): NMeLeu
  MOD_RES (6)..(6): NMePhe
  MOD_RES (8)..(8): 1-Nal
  MOD_RES (10)..(10): 1-Nal
  MOD_RES (11)..(11): Nle
  MOD_RES (12)..(12): D-Phe
  source: /note="C-term Amide"
ERPRLFAAGALF

SEQ ID NO: 1307 - protein, 12 aa, Artificial Sequence
  source: /note="Description of Artificial Sequence: Synthetic peptide"
  MOD_RES (1)..(1): PyroGlu
  MOD_RES (4)..(4): hArg
  MOD_RES (5)..(5): NMeLeu
  MOD_RES (6)..(6): NMePhe
  MOD_RES (11)..(11): Nle
  MOD_RES (12)..(12): D-Phe
  source: /note="C-term Amide"
ERPRLFAKGPLF

SEQ ID NO: 1308 - protein, 12 aa, Artificial Sequence
  source: /note="Description of Artificial Sequence: Synthetic peptide"
  MOD_RES (1)..(1): PyroGlu
  MOD_RES (4)..(4): hArg
  MOD_RES (5)..(5): NMeLeu
  MOD_RES (7)..(7): 2-Nal
  MOD_RES (10)..(10): 1-Nal
  MOD_RES (11)..(11): Nle
  MOD_RES (12)..(12): D-Phe
  source: /note="C-term Amide"
ERPRLSAKGALF

SEQ ID NO: 1309 - protein, 12 aa, Artificial Sequence
  source: /note="Description of Artificial Sequence: Synthetic peptide"
  MOD_RES (1)..(1): PyroGlu
  MOD_RES (4)..(4): hArg
  MOD_RES (5)..(5): NMeLeu
  MOD_RES (7)..(7): 2-Nal
  MOD_RES (10)..(10): 1-Nal
  MOD_RES (11)..(11): Nle
  MOD_RES (12)..(12): D-Phe
  source: /note="C-term Amide"
ERPRLFAKGALF

SEQ ID NO: 1310 - protein, 12 aa, Artificial Sequence
  source: /note="Description of Artificial Sequence: Synthetic peptide"
  MOD_RES (1)..(1): PyroGlu
  MOD_RES (4)..(4): hArg
  MOD_RES (5)..(5): NMeLeu
  MOD_RES (7)..(7): 2-Nal
  MOD_RES (11)..(11): Nle
  MOD_RES (12)..(12): D-Phe
  source: /note="C-term Amide"
ERPRLFAKGPLF

SEQ ID NO: 1311 - protein, 12 aa, Artificial Sequence
  source: /note="Description of Artificial Sequence: Synthetic peptide"
  MOD_RES (1)..(1): PyroGlu
  MOD_RES (4)..(4): hArg
  MOD_RES (5)..(5): NMeLeu
  MOD_RES (6)..(6): NMePhe
  MOD_RES (7)..(7): 2-Nal
  MOD_RES (11)..(11): Nle
  MOD_RES (12)..(12): D-Phe
  source: /note="C-term Amide"
ERPRLFAKGPLF

SEQ ID NO: 1312 - protein, 12 aa, Artificial Sequence
  source: /note="Description of Artificial Sequence: Synthetic peptide"
  MOD_RES (1)..(1): PyroGlu
  MOD_RES (4)..(4): hArg
  MOD_RES (5)..(5): Cha
  MOD_RES (11)..(11): Nle
  MOD_RES (12)..(12): D-1Nal
ERPRASHKGPLA

SEQ ID NO: 1313 - protein, 12 aa, Artificial Sequence
  source: /note="Description of Artificial Sequence: Synthetic peptide"
  MOD_RES (1)..(1): PyroGlu
  MOD_RES (4)..(4): hArg
  MOD_RES (5)..(5): Cha
  MOD_RES (11)..(11): Nle
  MOD_RES (12)..(12): 4-Cl-F
ERPRASHKGPLF

SEQ ID NO: 1314 - protein, 12 aa, Artificial Sequence
  source: /note="Description of Artificial Sequence: Synthetic peptide"
  MOD_RES (1)..(1): PyroGlu
  MOD_RES (4)..(4): hArg
  MOD_RES (5)..(5): Cha
  MOD_RES (11)..(11): Nle
  MOD_RES (12)..(12): 2-Nal
ERPRASHKGPLA

SEQ ID NO: 1315 - protein, 12 aa, Artificial Sequence
  source: /note="Description of Artificial Sequence: Synthetic peptide"
  MOD_RES (1)..(1): PyroGlu
  MOD_RES (4)..(4): hArg
  MOD_RES (5)..(5): Cha
  MOD_RES (11)..(11): Nle
  MOD_RES (12)..(12): NMePhe
  source: /note="C-term Amide"
ERPRASHKGPLF

SEQ ID NO: 1316 - protein, 12 aa, Artificial Sequence
  source: /note="Description of Artificial Sequence: Synthetic peptide"
  MOD_RES (1)..(1): PyroGlu
  MOD_RES (4)..(4): hArg
  MOD_RES (5)..(5): Cha
  MOD_RES (11)..(11): Nle
  MOD_RES (12)..(12): D-Phe
ERPRASHKGPLF

SEQ ID NO: 1317 - protein, 12 aa, Artificial Sequence
  source: /note="Description of Artificial Sequence: Synthetic peptide"
  MOD_RES (1)..(1): PyroGlu
  MOD_RES (4)..(4): hArg
  MOD_RES (5)..(5): Cha
  MOD_RES (11)..(11): Nle
  MOD_RES (12)..(12): D-Trp
ERPRASHKGPLW

SEQ ID NO: 1318 - protein, 12 aa, Artificial Sequence
  source: /note="Description of Artificial Sequence: Synthetic peptide"
  MOD_RES (1)..(1): PyroGlu
  MOD_RES (4)..(4): hArg
  MOD_RES (5)..(5): Cha
  MOD_RES (11)..(11): Nle
  MOD_RES (12)..(12): 1-Nal
ERPRASHKGPLA

SEQ ID NO: 1319 - protein, 12 aa, Artificial Sequence
  source: /note="Description of Artificial Sequence: Synthetic peptide"
  MOD_RES (1)..(1): PyroGlu
  MOD_RES (4)..(4): hArg
  MOD_RES (5)..(5): Cha
  MOD_RES (7)..(7): 1-Nal
  MOD_RES (10)..(10): 1-Nal
  MOD_RES (11)..(11): Nle
  MOD_RES (12)..(12): 4-Cl-F
  source: /note="C-term Amide"
ERPRAFAKGALF

SEQ ID NO: 1320 - protein, 12 aa, Artificial Sequence
  source: /note="Description of Artificial Sequence: Synthetic peptide"
  MOD_RES (1)..(1): PyroGlu
  MOD_RES (4)..(4): hArg
  MOD_RES (5)..(5): NMeLeu
  MOD_RES (8)..(8): 1-Nal
  MOD_RES (10)..(10): 1-Nal
  MOD_RES (11)..(11): Nle
  MOD_RES (12)..(12): D-Phe
  source: /note="C-term Amide"
ERPRLFAAGALF

SEQ ID NO: 1321 - protein, 12 aa, Artificial Sequence
  source: /note="Description of Artificial Sequence: Synthetic peptide"
  MOD_RES (1)..(1): PyroGlu
  MOD_RES (4)..(4): hArg
  MOD_RES (5)..(5): Cha
  MOD_RES (7)..(7): 1-Nal
  MOD_RES (10)..(10): Oic
  MOD_RES (11)..(11): Nle
  MOD_RES (12)..(12): 4-Cl-F
  source: /note="C-term Amide"
ERPRAFAKGXLF

SEQ ID NO: 1322 - protein, 12 aa, Artificial Sequence
  source: /note="Description of Artificial Sequence: Synthetic peptide"
  MOD_RES (1)..(1): PyroGlu
  MOD_RES (4)..(4): hArg
  MOD_RES (5)..(5): NMeLeu
  MOD_RES (8)..(8): 1-Nal
  MOD_RES (10)..(10): Oic
  MOD_RES (11)..(11): Nle
  MOD_RES (12)..(12): D-Phe
  source: /note="C-term Amide"
ERPRLFAAGXLF

SEQ ID NO: 1323 - protein, 12 aa, Artificial Sequence
  source: /note="Description of Artificial Sequence: Synthetic peptide"
  MOD_RES (1)..(1): PyroGlu
  MOD_RES (4)..(4): hArg
  MOD_RES (5)..(5): Cha
  MOD_RES (7)..(7): 1-Nal
  MOD_RES (10)..(10): 1-Nal
  MOD_RES (11)..(11): Nle
  MOD_RES (12)..(12): 4-Cl-F
  source: /note="C-term Amide"
ERPRAFAKGALF

SEQ ID NO: 1324 - protein, 12 aa, Artificial Sequence
  source: /note="Description of Artificial Sequence: Synthetic peptide"
  MOD_RES (1)..(1): PyroGlu
  MOD_RES (4)..(4): hArg
  MOD_RES (5)..(5): NMeLeu
  MOD_RES (8)..(8): 1-Nal
  MOD_RES (10)..(10): 1-Nal
  MOD_RES (11)..(11): Nle
  MOD_RES (12)..(12): D-Phe
  source: /note="C-term Amide"
ERPRLFAAGALF

SEQ ID NO: 1325 - protein, 12 aa, Artificial Sequence
  source: /note="Description of Artificial Sequence: Synthetic peptide"
  MOD_RES (1)..(1): PyroGlu
  MOD_RES (4)..(4): hArg
  MOD_RES (5)..(5): NMeLeu
  MOD_RES (6)..(6): NMePhe
  MOD_RES (8)..(8): 1-Nal
  MOD_RES (10)..(10): 1-Nal
  MOD_RES (11)..(11): Nle
  MOD_RES (12)..(12): D-Phe
  source: /note="C-term Amide"
ERPRLFAAGALF

SEQ ID NO: 1326 - protein, 12 aa, Artificial Sequence
  source: /note="Description of Artificial Sequence: Synthetic peptide"
  MOD_RES (1)..(1): PyroGlu
  MOD_RES (4)..(4): hArg
  MOD_RES (5)..(5): NMeLeu
  MOD_RES (8)..(8): 1-Nal
  MOD_RES (10)..(10): 1-Nal
  MOD_RES (11)..(11): Nle
  MOD_RES (12)..(12): D-Phe
  source: /note="C-term Amide"
ERPRLFAAGALF

SEQ ID NO: 1327 - protein, 15 aa, Artificial Sequence
  source: /note="Description of Artificial Sequence: Synthetic peptide"
  source: /note="N-term Acetyl"
  MOD_RES (1)..(1): Atz(PEG10)
  MOD_RES (7)..(7): hArg
  MOD_RES (8)..(8): Cha
  MOD_RES (14)..(14): Nle
  MOD_RES (15)..(15): D-Phe
AGGLRPRASHKGPLF

SEQ ID NO: 1328 - protein, 14 aa, Artificial Sequence
  source: /note="Description of Artificial Sequence: Synthetic peptide"
  source: /note="N-term Acetyl"
  MOD_RES (1)..(1): Atz(PEG10)
  MOD_RES (6)..(6): hArg
  MOD_RES (7)..(7): Cha
  MOD_RES (13)..(13): Nle
  MOD_RES (14)..(14): D-Phe
AGLRPRASHKGPLF

SEQ ID NO: 1329 - protein, 13 aa, Artificial Sequence
  source: /note="Description of Artificial Sequence: Synthetic peptide"
  source: /note="N-term Acetyl"
  MOD_RES (1)..(1): Atz(PEG10)
  MOD_RES (5)..(5): hArg
  MOD_RES (6)..(6): Cha
  MOD_RES (12)..(12): Nle
  MOD_RES (13)..(13): D-Phe
ALRPRASHKGPLF

SEQ ID NO: 1330 - protein, 12 aa, Artificial Sequence
  source: /note="Description of Artificial Sequence: Synthetic peptide"
  source: /note="N-term Acetyl"
  MOD_RES (1)..(1): Atz(PEG10)
  MOD_RES (4)..(4): hArg
  MOD_RES (5)..(5): Cha
  MOD_RES (11)..(11): Nle
  MOD_RES (12)..(12): D-Phe
ARPRASHKGPLF

SEQ ID NO: 1331 - protein, 12 aa, Artificial Sequence
  source: /note="Description of Artificial Sequence: Synthetic peptide"
  MOD_RES (1)..(1): PyroGlu
  MOD_RES (2)..(2): Atz(PEG10)
  MOD_RES (4)..(4): hArg
  MOD_RES (5)..(5): Cha
  MOD_RES (11)..(11): Nle
  MOD_RES (12)..(12): D-Phe
EAPRASHKGPLF

SEQ ID NO: 1332 - protein, 12 aa, Artificial Sequence
  source: /note="Description of Artificial Sequence: Synthetic peptide"
  MOD_RES (1)..(1): PyroGlu
  MOD_RES (3)..(3): Atz(PEG10)
  MOD_RES (4)..(4): hArg
  MOD_RES (5)..(5): Cha
  MOD_RES (11)..(11): Nle
  MOD_RES (12)..(12): D-Phe
ERARASHKGPLF

SEQ ID NO: 1333 - protein, 12 aa, Artificial Sequence
  source: /note="Description of Artificial Sequence: Synthetic peptide"
  MOD_RES (1)..(1): PyroGlu
  MOD_RES (4)..(4): Atz(PEG10)
  MOD_RES (5)..(5): Cha
  MOD_RES (11)..(11): Nle
  MOD_RES (12)..(12): D-Phe
ERPAASHKGPLF

SEQ ID NO: 1334 - protein, 12 aa, Artificial Sequence
  source: /note="Description of Artificial Sequence: Synthetic peptide"
  MOD_RES (1)..(1): PyroGlu
  MOD_RES (4)..(4): hArg
  MOD_RES (5)..(5): Atz(PEG10)
  MOD_RES (11)..(11): Nle
  MOD_RES (12)..(12): D-Phe
ERPRASHKGPLF

SEQ ID NO: 1335 - protein, 12 aa, Artificial Sequence
  source: /note="Description of Artificial Sequence: Synthetic peptide"
  MOD_RES (1)..(1): PyroGlu
  MOD_RES (4)..(4): hArg
  MOD_RES (5)..(5): Cha
  MOD_RES (6)..(6): Atz(PEG10)
  MOD_RES (11)..(11): Nle
  MOD_RES (12)..(12): D-Phe
ERPRAAHKGPLF

SEQ ID NO: 1336 - protein, 12 aa, Artificial Sequence
  source: /note="Description of Artificial Sequence: Synthetic peptide"
  MOD_RES (1)..(1): PyroGlu
  MOD_RES (4)..(4): hArg
  MOD_RES (5)..(5): Cha
  MOD_RES (7)..(7): Atz(PEG10)
  MOD_RES (11)..(11): Nle
  MOD_RES (12)..(12): D-Phe
ERPRASAKGPLF

SEQ ID NO: 1337 - protein, 12 aa, Artificial Sequence
  source: /note="Description of Artificial Sequence: Synthetic peptide"
  MOD_RES (1)..(1): PyroGlu
  MOD_RES (4)..(4): hArg
  MOD_RES (5)..(5): Cha
  MOD_RES (8)..(8): Atz(PEG10)
  MOD_RES (11)..(11): Nle
  MOD_RES (12)..(12): D-Phe
ERPRASHAGPLF

SEQ ID NO: 1338 - protein, 12 aa, Artificial Sequence
  source: /note="Description of Artificial Sequence: Synthetic peptide"
  MOD_RES (1)..(1): PyroGlu
  MOD_RES (4)..(4): hArg
  MOD_RES (5)..(5): Cha
  MOD_RES (9)..(9): Atz(PEG10)
  MOD_RES (11)..(11): Nle
  MOD_RES (12)..(12): D-Phe
ERPRASHKAPLF

SEQ ID NO: 1339 - protein, 12 aa, Artificial Sequence
  source: /note="Description of Artificial Sequence: Synthetic peptide"
  MOD_RES (1)..(1): PyroGlu
  MOD_RES (4)..(4): hArg
  MOD_RES (5)..(5): Cha
  MOD_RES (10)..(10): Atz(PEG10)
  MOD_RES (11)..(11): Nle
  MOD_RES (12)..(12): D-Phe
ERPRASHKGALF

SEQ ID NO: 1340 - protein, 12 aa, Artificial Sequence
  source: /note="Description of Artificial Sequence: Synthetic peptide"
  MOD_RES (1)..(1): PyroGlu
  MOD_RES (4)..(4): hArg
  MOD_RES (5)..(5): Cha
  MOD_RES (11)..(11): Atz(PEG10)
  MOD_RES (12)..(12): D-Phe
ERPRASHKGPAF

SEQ ID NO: 1341 - protein, 12 aa, Artificial Sequence
  source: /note="Description of Artificial Sequence: Synthetic peptide"
  MOD_RES (1)..(1): PyroGlu
  MOD_RES (4)..(4): hArg
  MOD_RES (5)..(5): Cha
  MOD_RES (11)..(11): Nle
  MOD_RES (12)..(12): Atz(PEG10)
  source: /note="C-term Amide"
ERPRASHKGPLA

SEQ ID NO: 1342 - protein, 13 aa, Artificial Sequence
  source: /note="Description of Artificial Sequence: Synthetic peptide"
  MOD_RES (1)..(1): PyroGlu
  MOD_RES (4)..(4): hArg
  MOD_RES (5)..(5): Cha
  MOD_RES (11)..(11): Nle
  MOD_RES (12)..(12): D-Phe
  MOD_RES (13)..(13): Atz(PEG10)
  source: /note="C-term Amide"
ERPRASHKGPLFA

SEQ ID NO: 1343 - protein, 14 aa, Artificial Sequence
  source: /note="Description of Artificial Sequence: Synthetic peptide"
  MOD_RES (1)..(1): PyroGlu
  MOD_RES (4)..(4): hArg
  MOD_RES (5)..(5): Cha
  MOD_RES (11)..(11): Nle
  MOD_RES (12)..(12): D-Phe
  MOD_RES (14)..(14): Atz(PEG10)
  source: /note="C-term Amide"
ERPRASHKGPLFGA

SEQ ID NO: 1344 - protein, 15 aa, Artificial Sequence
  source: /note="Description of Artificial Sequence: Synthetic peptide"
  MOD_RES (1)..(1): PyroGlu
  MOD_RES (4)..(4): hArg
  MOD_RES (5)..(5): Cha
  MOD_RES (11)..(11): Nle
  MOD_RES (12)..(12): D-Phe
  MOD_RES (15)..(15): Atz(PEG10)
  source: /note="C-term Amide"
ERPRASHKGPLFGGA

SEQ ID NO: 1345 - protein, 13 aa, Artificial Sequence
  source: /note="Description of Artificial Sequence: Synthetic peptide"
  source: /note="N-term Acetyl"
  MOD_RES (1)..(1): Atz(PEG10)
  MOD_RES (5)..(5): hArg
  MOD_RES (6)..(6): NMeLeu
  MOD_RES (7)..(7): Atz(PEG10)
  MOD_RES (12)..(12): Nle
  MOD_RES (13)..(13): 4-Cl-F
ALRPRLAHKGPLF

SEQ ID NO: 1346 - protein, 12 aa, Artificial Sequence
  source: /note="Description of Artificial Sequence: Synthetic peptide"
  MOD_RES (1)..(1): PyroGlu
  MOD_RES (4)..(4): hArg
  MOD_RES (5)..(5): Cha
  MOD_RES (6)..(6): Atz(PEG10)
  MOD_RES (11)..(11): Nle
  MOD_RES (12)..(12): 4-Cl-F
ERPRAAHKGPLF

SEQ ID NO: 1347 - protein, 12 aa, Artificial Sequence
  source: /note="Description of Artificial Sequence: Synthetic peptide"
  MOD_RES (1)..(1): PyroGlu
  MOD_RES (4)..(4): hArg
  MOD_RES (5)..(5): Cha
  MOD_RES (6)..(6): Atz(PEG10)
  MOD_RES (10)..(10): Oic
  MOD_RES (11)..(11): Nle
  MOD_RES (12)..(12): 4-Cl-F
ERPRAAHKGXLF

SEQ ID NO: 1348 - protein, 12 aa, Artificial Sequence
  source: /note="Description of Artificial Sequence: Synthetic peptide"
  MOD_RES (1)..(1): PyroGlu
  MOD_RES (4)..(4): hArg
  MOD_RES (5)..(5): Cha
  MOD_RES (6)..(6): Atz(PEG10)
  MOD_RES (10)..(10): Oic
  MOD_RES (11)..(11): Nle
  MOD_RES (12)..(12): 4-Cl-F
  source: /note="C-term Amide"
ERPRAAHKGXLF

SEQ ID NO: 1349 - protein, 12 aa, Artificial Sequence
  source: /note="Description of Artificial Sequence: Synthetic peptide"
  MOD_RES (1)..(1): PyroGlu
  MOD_RES (4)..(4): hArg
  MOD_RES (5)..(5): Cha
  MOD_RES (7)..(7): Atz(PEG10)
  MOD_RES (10)..(10): Oic
  MOD_RES (11)..(11): Nle
  MOD_RES (12)..(12): 4-Cl-F
ERPRAFAKGXLF

SEQ ID NO: 1350 - protein, 12 aa, Artificial Sequence
  source: /note="Description of Artificial Sequence: Synthetic peptide"
  MOD_RES (1)..(1): PyroGlu
  MOD_RES (4)..(4): hArg
  MOD_RES (5)..(5): Cha
  MOD_RES (7)..(7): Atz(PEG10)
  MOD_RES (10)..(10): Oic
  MOD_RES (11)..(11): Nle
  MOD_RES (12)..(12): 4-Cl-F
  source: /note="C-term Amide"
ERPRAFAKGXLF

SEQ ID NO: 1351 - protein, 12 aa, Artificial Sequence
  source: /note="Description of Artificial Sequence: Synthetic peptide"
  MOD_RES (1)..(1): PyroGlu
  MOD_RES (4)..(4): hArg
  MOD_RES (5)..(5): NMeLeu
  MOD_RES (7)..(7): Atz(PEG10)
  MOD_RES (10)..(10): Oic
  MOD_RES (11)..(11): Nle
  MOD_RES (12)..(12): 4-Cl-F
ERPRLFAKGXLF

SEQ ID NO: 1352 - protein, 12 aa, Artificial Sequence
  source: /note="Description of Artificial Sequence: Synthetic peptide"
  MOD_RES (1)..(1): PyroGlu
  MOD_RES (4)..(4): hArg
  MOD_RES (5)..(5): NMeLeu
  MOD_RES (7)..(7): Atz(PEG10)
  MOD_RES (10)..(10): Oic
  MOD_RES (11)..(11): Nle
  MOD_RES (12)..(12): 4-Cl-F
  source: /note="C-term Amide"
ERPRLFAKGXLF

SEQ ID NO: 1353 - protein, 12 aa, Artificial Sequence
  source: /note="Description of Artificial Sequence: Synthetic peptide"
  MOD_RES (1)..(1): PyroGlu
  MOD_RES (4)..(4): hArg
  MOD_RES (5)..(5): NMeLeu
  MOD_RES (6)..(6): Atz(PEG10)
  MOD_RES (11)..(11): Nle
  MOD_RES (12)..(12): 4-Cl-F
ERPRLAHKGPLF

SEQ ID NO: 1354 - protein, 12 aa, Artificial Sequence
  source: /note="Description of Artificial Sequence: Synthetic peptide"
  MOD_RES (1)..(1): PyroGlu
  MOD_RES (4)..(4): hArg
  MOD_RES (5)..(5): NMeLeu
  MOD_RES (6)..(6): Atz(PEG10)
  MOD_RES (10)..(10): Oic
  MOD_RES (11)..(11): Nle
  MOD_RES (12)..(12): 4-Cl-F
ERPRLAHKGXLF

SEQ ID NO: 1355 - protein, 12 aa, Artificial Sequence
  source: /note="Description of Artificial Sequence: Synthetic peptide"
  MOD_RES (1)..(1): PyroGlu
  MOD_RES (4)..(4): hArg
  MOD_RES (5)..(5): NMeLeu
  MOD_RES (6)..(6): Atz(PEG10)
  MOD_RES (10)..(10): Oic
  MOD_RES (11)..(11): Nle
  MOD_RES (12)..(12): 4-Cl-F
  source: /note="C-term Amide"
ERPRLAHKGXLF

SEQ ID NO: 1356 - protein, 13 aa, Artificial Sequence
  source: /note="Description of Artificial Sequence: Synthetic peptide"
  source: /note="N-term Acetyl"
  MOD_RES (1)..(1): Atz(PEG10)
  MOD_RES (5)..(5): hArg
  MOD_RES (6)..(6): NMeLeu
  MOD_RES (7)..(7): Atz(PEG10)
  MOD_RES (12)..(12): Nle
  MOD_RES (13)..(13): D-Phe
ALRPRLAHKGPLF

SEQ ID NO: 1357 - protein, 12 aa, Artificial Sequence
  source: /note="Description of Artificial Sequence: Synthetic peptide"
  MOD_RES (1)..(1): PyroGlu
  MOD_RES (4)..(4): hArg
  MOD_RES (5)..(5): Cha
  MOD_RES (6)..(6): Atz(PEG10)
  MOD_RES (11)..(11): Nle
  MOD_RES (12)..(12): D-Phe
ERPRAAHKGPLF

SEQ ID NO: 1358 - protein, 12 aa, Artificial Sequence
  source: /note="Description of Artificial Sequence: Synthetic peptide"
  MOD_RES (1)..(1): PyroGlu
  MOD_RES (4)..(4): hArg
  MOD_RES (5)..(5): Cha
  MOD_RES (6)..(6): Atz(PEG10)
  MOD_RES (10)..(10): Oic
  MOD_RES (11)..(11): Nle
  MOD_RES (12)..(12): D-Phe
ERPRAAHKGXLF

SEQ ID NO: 1359 - protein, 12 aa, Artificial Sequence
  source: /note="Description of Artificial Sequence: Synthetic peptide"
  MOD_RES (1)..(1): PyroGlu
  MOD_RES (4)..(4): hArg
  MOD_RES (5)..(5): Cha
  MOD_RES (7)..(7): Atz(PEG10)
  MOD_RES (11)..(11): Nle
  MOD_RES (12)..(12): D-Phe
ERPRAFAKGPLF

SEQ ID NO: 1360 - protein, 12 aa, Artificial Sequence
  source: /note="Description of Artificial Sequence: Synthetic peptide"
  MOD_RES (1)..(1): PyroGlu
  MOD_RES (4)..(4): hArg
  MOD_RES (5)..(5): Cha
  MOD_RES (7)..(7): Atz(PEG10)
  MOD_RES (10)..(10): Oic
  MOD_RES (11)..(11): Nle
  MOD_RES (12)..(12): D-Phe
ERPRAFAKGXLF

SEQ ID NO: 1361 - protein, 12 aa, Artificial Sequence
  source: /note="Description of Artificial Sequence: Synthetic peptide"
  MOD_RES (1)..(1): PyroGlu
  MOD_RES (4)..(4): hArg
  MOD_RES (5)..(5): Cha
  MOD_RES (7)..(7): Atz(PEG10)
  MOD_RES (11)..(11): Nle
  MOD_RES (12)..(12): D-Phe
  source: /note="C-term Amide"
ERPRAFAKGPLF

SEQ ID NO: 1362 - protein, 12 aa, Artificial Sequence
  source: /note="Description of Artificial Sequence: Synthetic peptide"
  MOD_RES (1)..(1): PyroGlu
  MOD_RES (4)..(4): hArg
  MOD_RES (5)..(5): Cha
  MOD_RES (7)..(7): Atz(PEG10)
  MOD_RES (10)..(10): Oic
  MOD_RES (11)..(11): Nle
  MOD_RES (12)..(12): D-Phe
  source: /note="C-term Amide"
ERPRAFAKGXLF

SEQ ID NO: 1363 - protein, 12 aa, Artificial Sequence
  source: /note="Description of Artificial Sequence: Synthetic peptide"
  MOD_RES (1)..(1): PyroGlu
  MOD_RES (4)..(4): hArg
  MOD_RES (5)..(5): NMeLeu
  MOD_RES (7)..(7): Atz(PEG10)
  MOD_RES (11)..(11): Nle
  MOD_RES (12)..(12): D-Phe
ERPRLFAKGPLF

SEQ ID NO: 1364 - protein, 12 aa, Artificial Sequence
  source: /note="Description of Artificial Sequence: Synthetic peptide"
  MOD_RES (1)..(1): PyroGlu
  MOD_RES (4)..(4): hArg
  MOD_RES (5)..(5): NMeLeu
  MOD_RES (7)..(7): Atz(PEG10)
  MOD_RES (10)..(10): Oic
  MOD_RES (11)..(11): Nle
  MOD_RES (12)..(12): D-Phe
ERPRLFAKGXLF

SEQ ID NO: 1365 - protein, 12 aa, Artificial Sequence
  source: /note="Description of Artificial Sequence: Synthetic peptide"
  MOD_RES (1)..(1): PyroGlu
  MOD_RES (4)..(4): hArg
  MOD_RES (5)..(5): NMeLeu
  MOD_RES (7)..(7): Atz(PEG10)
  MOD_RES (11)..(11): Nle
  MOD_RES (12)..(12): D-Phe
  source: /note="C-term Amide"
ERPRLFAKGPLF

SEQ ID NO: 1366 - protein, 12 aa, Artificial Sequence
  source: /note="Description of Artificial Sequence: Synthetic peptide"
  MOD_RES (1)..(1): PyroGlu
  MOD_RES (4)..(4): hArg
  MOD_RES (5)..(5): NMeLeu
  MOD_RES (7)..(7): Atz(PEG10)
  MOD_RES (10)..(10): Oic
  MOD_RES (11)..(11): Nle
  MOD_RES (12)..(12): D-Phe
  source: /note="C-term Amide"
ERPRLFAKGXLF

SEQ ID NO: 1367 - protein, 12 aa, Artificial Sequence
  source: /note="Description of Artificial Sequence: Synthetic peptide"
  MOD_RES (1)..(1): PyroGlu
  MOD_RES (4)..(4): hArg
  MOD_RES (5)..(5): NMeLeu
  MOD_RES (6)..(6): Atz(PEG10)
  MOD_RES (11)..(11): Nle
  MOD_RES (12)..(12): D-Phe
ERPRLAHKGPLF

SEQ ID NO: 1368 - protein, 12 aa, Artificial Sequence
  source: /note="Description of Artificial Sequence: Synthetic peptide"
  MOD_RES (1)..(1): PyroGlu
  MOD_RES (4)..(4): hArg
  MOD_RES (5)..(5): NMeLeu
  MOD_RES (6)..(6): Atz(PEG10)
  MOD_RES (10)..(10): Oic
  MOD_RES (11)..(11): Nle
  MOD_RES (12)..(12): D-Phe
ERPRLAHKGXLF

SEQ ID NO: 1369 - protein, 12 aa, Artificial Sequence
  source: /note="Description of Artificial Sequence: Synthetic peptide"
  MOD_RES (1)..(1): PyroGlu
  MOD_RES (4)..(4): hArg
  MOD_RES (5)..(5): NMeLeu
  MOD_RES (6)..(6): Atz(20K-mPEG)
  MOD_RES (10)..(10): Oic
  MOD_RES (11)..(11): Nle
  MOD_RES (12)..(12): 4-Cl-F
ERPRLAHKGXLF

SEQ ID NO: 1370 - protein, 12 aa, Artificial Sequence
  source: /note="Description of Artificial Sequence: Synthetic peptide"
  MOD_RES (1)..(1): PyroGlu
  MOD_RES (4)..(4): hArg
  MOD_RES (5)..(5): Cha
  MOD_RES (6)..(6): Atz(20K-mPEG)
  MOD_RES (10)..(10): Oic
  MOD_RES (11)..(11): Nle
  MOD_RES (12)..(12): 4-Cl-F
ERPRAAHKGXLF

SEQ ID NO: 1371 - protein, 12 aa, Artificial Sequence
  source: /note="Description of Artificial Sequence: Synthetic peptide"
  MOD_RES (1)..(1): PyroGlu
  MOD_RES (4)..(4): hArg
  MOD_RES (5)..(5): NMeLeu
  MOD_RES (7)..(7): Atz(20K-mPEG)
  MOD_RES (10)..(10): Oic
  MOD_RES (11)..(11): Nle
  MOD_RES (12)..(12): D-Phe
ERPRLFAKGXLF

SEQ ID NO: 1372 - protein, 13 aa, Artificial Sequence
  source: /note="Description of Artificial Sequence: Synthetic peptide"
  source: /note="N-term Acetyl"
  MOD_RES (1)..(1): Atz(20K-mPEG)
  MOD_RES (5)..(5): hArg
  MOD_RES (6)..(6): Cha
  MOD_RES (12)..(12): Nle
  MOD_RES (13)..(13): D-1Nal
ALRPRASHKGPLA

SEQ ID NO: 1373 - protein, 14 aa, Artificial Sequence
  source: /note="Description of Artificial Sequence: Synthetic peptide"
  source: /note="N-term Acetyl"
  MOD_RES (1)..(1): Atz(20K-mPEG)
  MOD_RES (2)..(2): Ahx
  MOD_RES (6)..(6): hArg
  MOD_RES (7)..(7): Cha
  MOD_RES (13)..(13): Nle
  MOD_RES (14)..(14): D-1Nal
AXLRPRASHKGPLA

SEQ ID NO: 1374 - protein, 12 aa, Artificial Sequence
  source: /note="Description of Artificial Sequence: Synthetic peptide"
  source: /note="N-term Palmitoyl"
  MOD_RES (4)..(4): hArg
  MOD_RES (5)..(5): Cha
  MOD_RES (11)..(11): Nle
  MOD_RES (12)..(12): 4-Cl-F
LRPRAFHKGPLF

SEQ ID NO: 1375 - protein, 12 aa, Artificial Sequence
  source: /note="Description of Artificial Sequence: Synthetic peptide"
  source: /note="N-term Palmitoyl"
  MOD_RES (4)..(4): hArg
  MOD_RES (5)..(5): Cha
  MOD_RES (11)..(11): Nle
  MOD_RES (12)..(12): D-1Nal
LRPRAFHKPPLA

SEQ ID NO: 1376 - protein, 12 aa, Artificial Sequence
  source: /note="Description of Artificial Sequence: Synthetic peptide"
  source: /note="N-term Palmitoyl"
  MOD_RES (4)..(4): hArg
  MOD_RES (5)..(5): Cha
  MOD_RES (11)..(11): Nle
  MOD_RES (12)..(12): 4-Cl-F
LRPRASHKGPLF

SEQ ID NO: 1377 - protein, 12 aa, Artificial Sequence
  source: /note="Description of Artificial Sequence: Synthetic peptide"
  source: /note="N-term Palmitoyl"
  MOD_RES (4)..(4): hArg
  MOD_RES (5)..(5): NMeLeu
  MOD_RES (8)..(8): 1-Nal
  MOD_RES (10)..(10): 1-Nal
  MOD_RES (11)..(11): Nle
  MOD_RES (12)..(12): 4-Cl-F
  source: /note="C-term Amide"
LRPRLFAAGALF

SEQ ID NO: 1378 - protein, 12 aa, Artificial Sequence
  source: /note="Description of Artificial Sequence: Synthetic peptide"
  source: /note="N-term Palmitoyl"
  MOD_RES (4)..(4): hArg
  MOD_RES (5)..(5): NMeLeu
  MOD_RES (8)..(8): 1-Nal
  MOD_RES (10)..(10): Oic
  MOD_RES (11)..(11): Nle
  MOD_RES (12)..(12): 4-Cl-F
  source: /note="C-term Amide"
LRPRLFAAGXLF

SEQ ID NO: 1379 - protein, 12 aa, Artificial Sequence
  source: /note="Description of Artificial Sequence: Synthetic peptide"
  source: /note="N-term Palmitoyl"
  MOD_RES (4)..(4): hArg
  MOD_RES (5)..(5): NMeLeu
  MOD_RES (8)..(8): 1-Nal
  MOD_RES (10)..(10): 1-Nal
  MOD_RES (11)..(11): Nle
  MOD_RES (12)..(12): 4-Cl-F
  source: /note="C-term Amide"
LRPRLFAAGALF

SEQ ID NO: 1380 - protein, 18 aa, Artificial Sequence
  source: /note="Description of Artificial Sequence: Synthetic peptide"
  MOD_RES (8)..(8): hArg
  MOD_RES (9)..(9): Cha
  MOD_RES (14)..(14): Oic
  MOD_RES (17)..(17): 4-Cl-F
  misc_feature (15)..(18): /note="Cyclic peptide"
KFRRQRPRASHKGXEPFK

SEQ ID NO: 1381 - protein, 17 aa, Artificial Sequence
  source: /note="Description of Artificial Sequence: Synthetic peptide"
  MOD_RES (8)..(8): hArg
  MOD_RES (9)..(9): Cha
  MOD_RES (15)..(15): Nle
  misc_feature (14)..(17): /note="Cyclic peptide"
KFRRQRPRASHKGELPK

SEQ ID NO: 1382 - protein, 17 aa, Artificial Sequence
  source: /note="Description of Artificial Sequence: Synthetic peptide"
  MOD_RES (8)..(8): hArg
  MOD_RES (9)..(9): Cha
  MOD_RES (14)..(14): Oic
  MOD_RES (15)..(15): Nle
  MOD_RES (17)..(17): 4-Cl-F
  misc_feature (13)..(16): /note="Cyclic peptide"
KFRRQRPRASHKEXLKF

SEQ ID NO: 1383 - protein, 17 aa, Artificial Sequence
  source: /note="Description of Artificial Sequence: Synthetic peptide"
  MOD_RES (8)..(8): hArg
  MOD_RES (9)..(9): Cha
  MOD_RES (14)..(14): Oic
  MOD_RES (17)..(17): 4-Cl-F
  misc_feature (12)..(15): /note="Cyclic peptide"
KFRRQRPRASHEGXKPF

SEQ ID NO: 1384 - protein, 17 aa, Artificial Sequence
  source: /note="Description of Artificial Sequence: Synthetic peptide"
  MOD_RES (8)..(8): hArg
  MOD_RES (9)..(9): Cha
  MOD_RES (15)..(15): Nle
  MOD_RES (17)..(17): 4-Cl-F
  misc_feature (11)..(14): /note="Cyclic peptide"
KFRRQRPRASEKGKLPF

SEQ ID NO: 1385 - protein, 17 aa, Artificial Sequence
  source: /note="Description of Artificial Sequence: Synthetic peptide"
  MOD_RES (8)..(8): hArg
  MOD_RES (9)..(9): Cha
  MOD_RES (14)..(14): Oic
  MOD_RES (15)..(15): Nle
  MOD_RES (17)..(17): 4-Cl-F
  misc_feature (10)..(13): /note="Cyclic peptide"
KFRRQRPRAEHKKXLPF

SEQ ID NO: 1386 - protein, 17 aa, Artificial Sequence
  source: /note="Description of Artificial Sequence: Synthetic peptide"
  MOD_RES (8)..(8): hArg
  MOD_RES (14)..(14): Oic
  MOD_RES (15)..(15): Nle
  MOD_RES (17)..(17): 4-Cl-F
  misc_feature (9)..(12): /note="Cyclic peptide"
KFRRQRPRESHKGXLPF

SEQ ID NO: 1387 - protein, 17 aa, Artificial Sequence
  source: /note="Description of Artificial Sequence: Synthetic peptide"
  MOD_RES (9)..(9): Cha
  MOD_RES (14)..(14): Oic
  MOD_RES (15)..(15): Nle
  MOD_RES (17)..(17): 4-Cl-F
  misc_feature (8)..(11): /note="Cyclic peptide"
KFRRQRPEASKKGXLPF

SEQ ID NO: 1388 - protein, 17 aa, Artificial Sequence
  source: /note="Description of Artificial Sequence: Synthetic peptide"
  MOD_RES (8)..(8): hArg
  MOD_RES (9)..(9): Cha
  MOD_RES (14)..(14): Oic
  MOD_RES (15)..(15): Nle
  MOD_RES (17)..(17): 4-Cl-F
  misc_feature (7)..(10): /note="Cyclic peptide"
KFRRQRERAKHKGXLPF

SEQ ID NO: 1389 - protein, 17 aa, Artificial Sequence
  source: /note="Description of Artificial Sequence: Synthetic peptide"
  MOD_RES (8)..(8): hArg
  MOD_RES (14)..(14): Oic
  MOD_RES (15)..(15): Nle
  MOD_RES (17)..(17): 4-Cl-F
  misc_feature (6)..(9): /note="Cyclic peptide"
KFRRQEPRKSHKGXLPF

SEQ ID NO: 1390 - protein, 17 aa, Artificial Sequence
  source: /note="Description of Artificial Sequence: Synthetic peptide"
  MOD_RES (9)..(9): Cha
  MOD_RES (14)..(14): Oic
  MOD_RES (15)..(15): Nle
  MOD_RES (17)..(17): 4-Cl-F
  misc_feature (5)..(8): /note="Cyclic peptide"
KFRRERPKASHKGXLPF

SEQ ID NO: 1391 - protein, 17 aa, Artificial Sequence
  source: /note="Description of Artificial Sequence: Synthetic peptide"
  MOD_RES (8)..(8): hArg
  MOD_RES (9)..(9): Cha
  MOD_RES (14)..(14): Oic
  MOD_RES (15)..(15): Nle
  MOD_RES (17)..(17): 4-Cl-F
  misc_feature (4)..(7): /note="Cyclic peptide"
KFREQRKRASHKGXLPF

SEQ ID NO: 1392 - protein, 17 aa, Artificial Sequence
  source: /note="Description of Artificial Sequence: Synthetic peptide"
  MOD_RES (8)..(8): hArg
  MOD_RES (9)..(9): Cha
  MOD_RES (14)..(14): Oic
  MOD_RES (15)..(15): Nle
  MOD_RES (17)..(17): 4-Cl-F
  misc_feature (3)..(6): /note="Cyclic peptide"
KFERQKPRASHKGXLPF

SEQ ID NO: 1393 - protein, 17 aa, Artificial Sequence
  source: /note="Description of Artificial Sequence: Synthetic peptide"
  MOD_RES (8)..(8): hArg
  MOD_RES (9)..(9): Cha
  MOD_RES (14)..(14): Oic
  MOD_RES (15)..(15): Nle
  MOD_RES (17)..(17): 4-Cl-F
  misc_feature (2)..(5): /note="Cyclic peptide"
KERRKRPRASHKGXLPF

SEQ ID NO: 1394 - protein, 17 aa, Artificial Sequence
  source: /note="Description of Artificial Sequence: Synthetic peptide"
  MOD_RES (8)..(8): hArg
  MOD_RES (9)..(9): Cha
  MOD_RES (14)..(14): Oic
  MOD_RES (15)..(15): Nle
  MOD_RES (17)..(17): 4-Cl-F
  misc_feature (1)..(4): /note="Cyclic peptide"
EFRKQRPRASHKGXLPF

SEQ ID NO: 1395 - protein, 18 aa, Artificial Sequence
  source: /note="Description of Artificial Sequence: Synthetic peptide"
  MOD_RES (8)..(8): hArg
  MOD_RES (9)..(9): Cha
  MOD_RES (15)..(15): Nle
  MOD_RES (17)..(17): 4-Cl-F
  misc_feature (14)..(18): /note="Cyclic peptide"
KFRRQRPRASHKGELPFK

SEQ ID NO: 1396 - protein, 17 aa, Artificial Sequence
  source: /note="Description of Artificial Sequence: Synthetic peptide"
  MOD_RES (8)..(8): hArg
  MOD_RES (9)..(9): Cha
  MOD_RES (14)..(14): Oic
  MOD_RES (15)..(15): Nle
  misc_feature (13)..(17): /note="Cyclic peptide"
KFRRQRPRASHKEXLPK

SEQ ID NO: 1397 - protein, 17 aa, Artificial Sequence
  source: /note="Description of Artificial Sequence: Synthetic peptide"
  MOD_RES (8)..(8): hArg
  MOD_RES (9)..(9): Cha
  MOD_RES (14)..(14): Oic
  MOD_RES (15)..(15): Nle
  MOD_RES (17)..(17): 4-Cl-F
  misc_feature (12)..(16): /note="Cyclic peptide"
KFRRQRPRASHEGXLKF

SEQ ID NO: 1398 - protein, 17 aa, Artificial Sequence
  source: /note="Description of Artificial Sequence: Synthetic peptide"
  MOD_RES (8)..(8): hArg
  MOD_RES (9)..(9): Cha
  MOD_RES (14)..(14): Oic
  MOD_RES (17)..(17): 4-Cl-F
  misc_feature (11)..(15): /note="Cyclic peptide"
KFRRQRPRASEKGXKPF

SEQ ID NO: 1399 - protein, 17 aa, Artificial Sequence
  source: /note="Description of Artificial Sequence: Synthetic peptide"
  MOD_RES (8)..(8): hArg
  MOD_RES (9)..(9): Cha
  MOD_RES (15)..(15): Nle
  MOD_RES (17)..(17): 4-Cl-F
  misc_feature (10)..(14): /note="Cyclic peptide"
KFRRQRPRAEHKGKLPF

SEQ ID NO: 1400 - protein, 17 aa, Artificial Sequence
  source: /note="Description of Artificial Sequence: Synthetic peptide"
  MOD_RES (8)..(8): hArg
  MOD_RES (14)..(14): Oic
  MOD_RES (15)..(15): Nle
  MOD_RES (17)..(17): 4-Cl-F
  misc_feature (9)..(13): /note="Cyclic peptide"
KFRRQRPRESHKKXLPF

SEQ ID NO: 1401 - protein, 17 aa, Artificial Sequence
  source: /note="Description of Artificial Sequence: Synthetic peptide"
  MOD_RES (9)..(9): Cha
  MOD_RES (14)..(14): Oic
  MOD_RES (15)..(15): Nle
  MOD_RES (17)..(17): 4-Cl-F
  misc_feature (8)..(12): /note="Cyclic peptide"
KFRRQRPEASHKGXLPF

SEQ ID NO: 1402 - protein, 17 aa, Artificial Sequence
  source: /note="Description of Artificial Sequence: Synthetic peptide"
  MOD_RES (8)..(8): hArg
  MOD_RES (9)..(9): Cha
  MOD_RES (14)..(14): Oic
  MOD_RES (15)..(15): Nle
  MOD_RES (17)..(17): 4-Cl-F
  misc_feature (7)..(11): /note="Cyclic peptide"
KFRRQRERASKKGXLPF

SEQ ID NO: 1403 - protein, 17 aa, Artificial Sequence
  source: /note="Description of Artificial Sequence: Synthetic peptide"
  MOD_RES (8)..(8): hArg
  MOD_RES (9)..(9): Cha
  MOD_RES (14)..(14): Oic
  MOD_RES (15)..(15): Nle
  MOD_RES (17)..(17): 4-Cl-F
  misc_feature (6)..(10): /note="Cyclic peptide"
KFRRQEPRAKHKGXLPF

SEQ ID NO: 1404 - protein, 17 aa, Artificial Sequence
  source: /note="Description of Artificial Sequence: Synthetic peptide"
  MOD_RES (8)..(8): hArg
  MOD_RES (14)..(14): Oic
  MOD_RES (15)..(15): Nle
  MOD_RES (17)..(17): 4-Cl-F
  misc_feature (5)..(9): /note="Cyclic peptide"
KFRRERPRKSHKGXLPF

SEQ ID NO: 1405 - protein, 17 aa, Artificial Sequence
  source: /note="Description of Artificial Sequence: Synthetic peptide"
  MOD_RES (9)..(9): Cha
  MOD_RES (14)..(14): Oic
  MOD_RES (15)..(15): Nle
  MOD_RES (17)..(17): 4-Cl-F
  misc_feature (4)..(8): /note="Cyclic peptide"
KFREQRPKASHKGXLPF

SEQ ID NO: 1406 - protein, 17 aa, Artificial Sequence
  source: /note="Description of Artificial Sequence: Synthetic peptide"
  MOD_RES (8)..(8): hArg
  MOD_RES (9)..(9): Cha
  MOD_RES (14)..(14): Oic
  MOD_RES (15)..(15): Nle
  MOD_RES (17)..(17): 4-Cl-F
  misc_feature (3)..(7): /note="Cyclic peptide"
KFERQRKRASHKGXLPF

SEQ ID NO: 1407 - protein, 17 aa, Artificial Sequence
  source: /note="Description of Artificial Sequence: Synthetic peptide"
  MOD_RES (8)..(8): hArg
  MOD_RES (9)..(9): Cha
  MOD_RES (14)..(14): Oic
  MOD_RES (15)..(15): Nle
  MOD_RES (17)..(17): 4-Cl-F
  misc_feature (2)..(6): /note="Cyclic peptide"
KERRQKPRASHKGXLPF

SEQ ID NO: 1408 - protein, 17 aa, Artificial Sequence
  source: /note="Description of Artificial Sequence: Synthetic peptide"
  MOD_RES (8)..(8): hArg
  MOD_RES (9)..(9): Cha
  MOD_RES (14)..(14): Oic
  MOD_RES (15)..(15): Nle
  MOD_RES (17)..(17): 4-Cl-F
  misc_feature (1)..(5): /note="Cyclic peptide"
EFRRKRPRASHKGXLPF

SEQ ID NO: 1409 - protein, 17 aa, Artificial Sequence
  source: /note="Description of Artificial Sequence: Synthetic peptide"
  MOD_RES (8)..(8): hArg
  MOD_RES (9)..(9): Cha
  MOD_RES (14)..(14): Oic
  MOD_RES (15)..(15): Nle
  MOD_RES (17)..(17): 4-Cl-F
  misc_feature (1)..(17): /note="Cyclic peptide; covalent bond between N-term and the residue at position 17"
KFRRQRPRASHKGXLPF

SEQ ID NO: 1410 - protein, 18 aa, Artificial Sequence
  source: /note="Description of Artificial Sequence: Synthetic peptide"
  MOD_RES (8)..(8): hArg
  MOD_RES (9)..(9): Cha
  MOD_RES (14)..(14): Oic
  MOD_RES (15)..(15): Nle
  MOD_RES (17)..(17): 4-Cl-F
  misc_feature (1)..(18): /note="Cyclic peptide; covalent bond between N-term and the residue at position 18"
KFRRQRPRASHKGXLPFE

SEQ ID NO: 1411 - protein, 18 aa, Artificial Sequence
  source: /note="Description of Artificial Sequence: Synthetic peptide"
  MOD_RES (8)..(8): hArg
  MOD_RES (9)..(9): Cha
  MOD_RES (14)..(14): Oic
  MOD_RES (15)..(15): Nle
  MOD_RES (17)..(17): 4-Cl-F
  misc_feature (1)..(18): /note="Cyclic peptide; covalent bond between N-term and the residue at position 18"
KFRRQRPRASHKGXLPFD

SEQ ID NO: 1412 - protein, 21 aa, Artificial Sequence
  source: /note="Description of Artificial Sequence: Synthetic peptide"
GGGGSDDSDEGSDGEDGGGGS

SEQ ID NO: 1413 - protein, 13 aa, Artificial Sequence
  source: /note="Description of Artificial Sequence: Synthetic peptide"
  source: /note="N-term Bromoacetyl-NPEG11"
  MOD_RES (4)..(4): hArg
  MOD_RES (5)..(5): Cha
  MOD_RES (10)..(10): Oic
  MOD_RES (11)..(11): Nle
  MOD_RES (13)..(13): 4-Cl-F
LRPRASHKGXLPF

SEQ ID NO: 1414 - protein, 17 aa, Artificial Sequence
  source: /note="Description of Artificial Sequence: Synthetic peptide"
  source: /note="N-term Bromoacetyl-NPEG11"
  MOD_RES (8)..(8): hArg
  MOD_RES (9)..(9): Cha
  MOD_RES (14)..(14): Oic
  MOD_RES (15)..(15): Nle
  MOD_RES (17)..(17): 4-Cl-F
KFRRQRPRASHKGXLPF

SEQ ID NO: 1415 - protein, 228 aa, Artificial Sequence
  source: /note="Description of Artificial Sequence: Synthetic polypeptide"
MDKTHTCPPCPAPELLGGPSVFLFPPKPKDTLMISRTPEVTCVVVDVSHEDPCVKFNWYVDGVEVHNAKTKPREEQYNSTYRVVSVLTVLHQDWLNGKEYKCKVSNKALPAPIEKTISKAKGQPREPQVYTLPPSRDELTKNQVSLTCLVKGFYPSDIAVEWESNGQPENNYKTTPPVLDSDGSFFLYSKLTVDKSRWQQGNVFSCSVMHEALHNHYTQKSLSLSPGK

SEQ ID NO: 1416 - protein, 17 aa, Artificial Sequence
  source: /note="Description of Artificial Sequence: Synthetic peptide"
  source: /note="N-term NPEG11"
  MOD_RES (8)..(8): hArg
  MOD_RES (9)..(9): Cha
  MOD_RES (14)..(14): Oic
  MOD_RES (15)..(15): Nle
  MOD_RES (17)..(17): 4-Cl-F
KFRRQRPRASHKGXLPF

SEQ ID NO: 1417 - protein, 18 aa, Artificial Sequence
  source: /note="Description of Artificial Sequence: Synthetic peptide"
  MOD_RES (1)..(1): Atz(PEG10)
  MOD_RES (9)..(9): hArg
  MOD_RES (10)..(10): Cha
  MOD_RES (15)..(15): Oic
  MOD_RES (16)..(16): Nle
  MOD_RES (18)..(18): 4-Cl-F
AKFRRQRPRASHKGXLPF

SEQ ID NO: 1418 - protein, 18 aa, Artificial Sequence
  source: /note="Description of Artificial Sequence: Synthetic peptide"
  MOD_RES (1)..(1): Atz(PEG10)
  MOD_RES (4)..(5): hArg
  MOD_RES (9)..(9): hArg
  MOD_RES (10)..(10): Cha
  MOD_RES (15)..(15): Oic
  MOD_RES (16)..(16): Nle
  MOD_RES (18)..(18): 4-Cl-F
AKFRRQRPRASHKGXLPF

SEQ ID NO: 1419 - protein, 18 aa, Artificial Sequence
  source: /note="Description of Artificial Sequence: Synthetic peptide"
  MOD_RES (1)..(1): Atz(PEG10)
  MOD_RES (4)..(5): hArg
  MOD_RES (7)..(7): hArg
  MOD_RES (9)..(9): hArg
  MOD_RES (10)..(10): Cha
  MOD_RES (15)..(15): Oic
  MOD_RES (16)..(16): Nle
  MOD_RES (18)..(18): 4-Cl-F
AKFRRQRPRASHKGXLPF

SEQ ID NO: 1420 - protein, 18 aa, Artificial Sequence
  source: /note="Description of Artificial Sequence: Synthetic peptide"
  MOD_RES (1)..(1): Atz(PEG10)
  MOD_RES (4)..(5): hArg
  MOD_RES (9)..(9): hArg
  MOD_RES (10)..(10): Cha
  MOD_RES (15)..(15): Oic
  MOD_RES (16)..(16): Nle
  MOD_RES (18)..(18): 4-Cl-F
AKFRRQQPRASHKGXLPF

SEQ ID NO: 1421 - protein, 18 aa, Artificial Sequence
  source: /note="Description of Artificial Sequence: Synthetic peptide"
  MOD_RES (1)..(1): Atz(PEG10)
  MOD_RES (4)..(5): hArg
  MOD_RES (7)..(7): Cit
  MOD_RES (9)..(9): hArg
  MOD_RES (10)..(10): Cha
  MOD_RES (15)..(15): Oic
  MOD_RES (16)..(16): Nle
  MOD_RES (18)..(18): 4-Cl-F
AKFRRQXPRASHKGXLPF

SEQ ID NO: 1422 - protein, 18 aa, Artificial Sequence
  source: /note="Description of Artificial Sequence: Synthetic peptide"
  MOD_RES (1)..(1): Atz(PEG10)
  MOD_RES (4)..(4): hArg
  MOD_RES (5)..(5): Cit
  MOD_RES (7)..(7): Cit
  MOD_RES (9)..(9): hArg
  MOD_RES (10)..(10): Cha
  MOD_RES (15)..(15): Oic
  MOD_RES (16)..(16): Nle
  MOD_RES (18)..(18): 4-Cl-F
AKFRXQXPRASHKGXLPF

SEQ ID NO: 1423 - protein, 17 aa, Artificial Sequence
  source: /note="Description of Artificial Sequence: Synthetic peptide"
  source: /note="N-term NPEG11"
  MOD_RES (8)..(8): hArg
  MOD_RES (9)..(9): Cha
  MOD_RES (14)..(14): Oic
  MOD_RES (15)..(15): Nle
  MOD_RES (17)..(17): 4-Cl-F
KFRRQRPRASHKGXLPF

SEQ ID NO: 1424 - protein, 17 aa, Artificial Sequence
  source: /note="Description of Artificial Sequence: Synthetic peptide"
  MOD_RES (1)..(1): Atz(PEG10)
  MOD_RES (8)..(8): hArg
  MOD_RES (9)..(9): Cha
  MOD_RES (14)..(14): Oic
  MOD_RES (15)..(15): Nle
  MOD_RES (17)..(17): 4-Cl-F
AFRRQRPRASHKGXLPF

SEQ ID NO: 1425 - protein, 13 aa, Artificial Sequence
  source: /note="Description of Artificial Sequence: Synthetic peptide"
  MOD_RES (1)..(1): PyroGlu
  MOD_RES (4)..(4): hArg
  MOD_RES (11)..(11): pI-Phe
  MOD_RES (12)..(12): 1-Nal
ERPRLFHKGPFAF

SEQ ID NO: 1426 - protein, 17 aa, Artificial Sequence
  source: /note="Description of Artificial Sequence: Synthetic peptide"
  source: /note="N-term Bromoacetyl-NPeg11"
  MOD_RES (1)..(1): Orn
  MOD_RES (3)..(4): hArg
  MOD_RES (6)..(6): hArg
  MOD_RES (8)..(8): hArg
  MOD_RES (9)..(9): Cha
  MOD_RES (14)..(14): Oic
  MOD_RES (15)..(15): Nle
  MOD_RES (17)..(17): 4-Cl-F
XFRRQRPRASHKGXLPF

SEQ ID NO: 1427 - protein, 13 aa, Artificial Sequence
  source: /note="Description of Artificial Sequence: Synthetic peptide"
  source: /note="N-term Bromoacetyl-NPeg11"
  MOD_RES (4)..(4): hArg
  MOD_RES (5)..(5): Cha
  MOD_RES (10)..(10): Oic
  MOD_RES (11)..(11): Nle
  MOD_RES (13)..(13): 4-Cl-F
QRPRASHKGXLPF

SEQ ID NO: 1428 - protein, 15 aa, Artificial Sequence
  source: /note="Description of Artificial Sequence: Synthetic peptide"
  source: /note="N-term Bromoacetyl"
  MOD_RES (6)..(6): hArg
  MOD_RES (7)..(7): Cha
  MOD_RES (12)..(12): Oic
  MOD_RES (13)..(13): Nle
  MOD_RES (15)..(15): 4-Cl-F
GGLRPRASHKGXLPF

SEQ ID NO: 1429 - protein, 18 aa, Artificial Sequence
  source: /note="Description of Artificial Sequence: Synthetic peptide"
  source: /note="N-term Bromoacetyl"
  MOD_RES (4)..(5): hArg
  MOD_RES (7)..(7): hArg
  MOD_RES (9)..(9): hArg
  MOD_RES (10)..(10): Cha
  MOD_RES (15)..(15): Oic
  MOD_RES (16)..(16): Nle
  MOD_RES (18)..(18): 4-Cl-F
GGFRRQRPRASHKGXLPF

SEQ ID NO: 1430 - protein, 19 aa, Artificial Sequence
  source: /note="Description of Artificial Sequence: Synthetic peptide"
  source: /note="N-term Bromoacetyl"
  MOD_RES (3)..(3): Orn
  MOD_RES (5)..(6): hArg
  MOD_RES (8)..(8): hArg
  MOD_RES (10)..(10): hArg
  MOD_RES (11)..(11): Cha
  MOD_RES (16)..(16): Oic
  MOD_RES (17)..(17): Nle
  MOD_RES (19)..(19): 4-Cl-F
GGXFRRQRPRASHKGXLPF

SEQ ID NO: 1431 - protein, 15 aa, Artificial Sequence
  source: /note="Description of Artificial Sequence: Synthetic peptide"
  source: /note="N-term Bromoacetyl"
  MOD_RES (6)..(6): hArg
  MOD_RES (7)..(7): Cha
  MOD_RES (12)..(12): Oic
  MOD_RES (13)..(13): Nle
  MOD_RES (15)..(15): 4-Cl-F
GGQRPRASHKGXLPF

SEQ ID NO: 1432 - protein, 13 aa, Artificial Sequence
  source: /note="Description of Artificial Sequence: Synthetic peptide"
  source: /note="N-term Bromoacetyl-Aeea"
  MOD_RES (4)..(4): hArg
  MOD_RES (5)..(5): Cha
  MOD_RES (10)..(10): Oic
  MOD_RES (11)..(11): Nle
  MOD_RES (13)..(13): 4-Cl-F
LRPRASHKGXLPF

SEQ ID NO: 1433 - protein, 16 aa, Artificial Sequence
  source: /note="Description of Artificial Sequence: Synthetic peptide"
  source: /note="N-term Bromoacetyl-Aeea"
  MOD_RES (2)..(3): hArg
  MOD_RES (5)..(5): hArg
  MOD_RES (7)..(7): hArg
  MOD_RES (8)..(8): Cha
  MOD_RES (13)..(13): Oic
  MOD_RES (14)..(14): Nle
  MOD_RES (16)..(16): 4-Cl-F
FRRQRPRASHKGXLPF

SEQ ID NO: 1434 - protein, 17 aa, Artificial Sequence
  source: /note="Description of Artificial Sequence: Synthetic peptide"
  source: /note="N-term Bromoacetyl-Aeea"
  MOD_RES (1)..(1): Orn
  MOD_RES (3)..(4): hArg
  MOD_RES (6)..(6): hArg
  MOD_RES (8)..(8): hArg
  MOD_RES (9)..(9): Cha
  MOD_RES (14)..(14): Oic
  MOD_RES (15)..(15): Nle
  MOD_RES (17)..(17): 4-Cl-F
XFRRQRPRASHKGXLPF

SEQ ID NO: 1435 - protein, 13 aa, Artificial Sequence
  source: /note="Description of Artificial Sequence: Synthetic peptide"
  source: /note="N-term Bromoacetyl-Aeea"
  MOD_RES (4)..(4): hArg
  MOD_RES (5)..(5): Cha
  MOD_RES (10)..(10): Oic
  MOD_RES (11)..(11): Nle
  MOD_RES (13)..(13): 4-Cl-F
QRPRASHKGXLPF

SEQ ID NO: 1436 - protein, 17 aa, Artificial Sequence
  source: /note="Description of Artificial Sequence: Synthetic peptide"
  source: /note="N-term Bromoacetyl"
  MOD_RES (8)..(8): hArg
  MOD_RES (9)..(9): Cha
  MOD_RES (14)..(14): Oic
  MOD_RES (15)..(15): Nle
  MOD_RES (17)..(17): 4-Cl-F
GSGSLRPRASHKGXLPF

SEQ ID NO: 1437 - protein, 20 aa, Artificial Sequence
  source: /note="Description of Artificial Sequence: Synthetic peptide"
  source: /note="N-term Bromoacetyl"
  MOD_RES (6)..(7): hArg
  MOD_RES (9)..(9): hArg
  MOD_RES (11)..(11): hArg
  MOD_RES (12)..(12): Cha
  MOD_RES (17)..(17): Oic
  MOD_RES (18)..(18): Nle
  MOD_RES (20)..(20): 4-Cl-F
GSGSFRRQRPRASHKGXLPF

SEQ ID NO: 1438 - protein, 21 aa, Artificial Sequence
  source: /note="Description of Artificial Sequence: Synthetic peptide"
  source: /note="N-term Bromoacetyl"
  MOD_RES (5)..(5): Orn
  MOD_RES (7)..(8): hArg
  MOD_RES (10)..(10): hArg
  MOD_RES (12)..(12): hArg
  MOD_RES (13)..(13): Cha
  MOD_RES (18)..(18): Oic
  MOD_RES (19)..(19): Nle
  MOD_RES (21)..(21): 4-Cl-F
GSGSXFRRQRPRASHKGXLPF

SEQ ID NO: 1439 - protein, 17 aa, Artificial Sequence
  source: /note="Description of Artificial Sequence: Synthetic peptide"
  source: /note="N-term Bromoacetyl"
  MOD_RES (8)..(8): hArg
  MOD_RES (9)..(9): Cha
  MOD_RES (14)..(14): Oic
  MOD_RES (15)..(15): Nle
  MOD_RES (17)..(17): 4-Cl-F
GSGSQRPRASHKGXLPF

SEQ ID NO: 1440 - protein, 13 aa, Artificial Sequence
  source: /note="Description of Artificial Sequence: Synthetic peptide"
  MOD_RES (1)..(1): PyroGlu
  MOD_RES (5)..(5): NMeLeu
  MOD_RES (11)..(11): pI-Phe
  MOD_RES (12)..(12): 1-Nal
ERPRLFHKGPFAF

SEQ ID NO: 1441 - protein, 13 aa, Artificial Sequence
  source: /note="Description of Artificial Sequence: Synthetic peptide"
  MOD_RES (1)..(1): PyroGlu
  MOD_RES (4)..(4): hArg
  MOD_RES (5)..(5): Cha
  MOD_RES (11)..(11): Nle
  MOD_RES (12)..(12): 4-Cl-F
  MOD_RES (13)..(13): K(palmitoyl)
  source: /note="C-term Amide"
ERPRASHKGPLFK

SEQ ID NO: 1442 - protein, 13 aa, Artificial Sequence
  source: /note="Description of Artificial Sequence: Synthetic peptide"
  MOD_RES (1)..(1): PyroGlu
  MOD_RES (4)..(4): hArg
  MOD_RES (5)..(5): Cha
  MOD_RES (11)..(11): Nle
  MOD_RES (12)..(12): D-1Nal
  MOD_RES (13)..(13): K(palmitoyl)
  source: /note="C-term Amide"
ERPRASHKGPLAK

SEQ ID NO: 1443 - protein, 14 aa, Artificial Sequence
  source: /note="Description of Artificial Sequence: Synthetic peptide"
  source: /note="N-term Acetyl"
  MOD_RES (1)..(1): Pra
  MOD_RES (5)..(5): hArg
  MOD_RES (6)..(6): NMeLeu
  MOD_RES (7)..(7): Pra
  MOD_RES (12)..(12): Nle
  MOD_RES (13)..(13): Oic
  MOD_RES (14)..(14): 4-Cl-F
GLRPRLGHKGPLXF

SEQ ID NO: 1444 - protein, 14 aa, Artificial Sequence
  source: /note="Description of Artificial Sequence: Synthetic peptide"
  source: /note="N-term Acetyl"
  MOD_RES (1)..(1): Pra
  MOD_RES (5)..(5): hArg
  MOD_RES (6)..(6): NMeLeu
  MOD_RES (7)..(7): Pra
  MOD_RES (11)..(11): Oic
  MOD_RES (12)..(12): Nle
  MOD_RES (13)..(13): Oic
  MOD_RES (14)..(14): 4-Cl-F
GLRPRLGHKGXLXF

SEQ ID NO: 1445 - protein, 14 aa, Artificial Sequence
  source: /note="Description of Artificial Sequence: Synthetic peptide"
  source: /note="N-term Acetyl"
  MOD_RES (1)..(1): Pra
  MOD_RES (5)..(5): hArg
  MOD_RES (6)..(6): NMeLeu
  MOD_RES (7)..(7): Pra
  MOD_RES (11)..(11): Oic
  MOD_RES (12)..(12): Nle
  MOD_RES (13)..(13): Tic
  MOD_RES (14)..(14): 4-Cl-F
GLRPRLGHKGXLXF

SEQ ID NO: 1446 - protein, 13 aa, Artificial Sequence
  source: /note="Description of Artificial Sequence: Synthetic peptide"
  MOD_RES (1)..(1): PyroGlu
  MOD_RES (4)..(4): hArg
  MOD_RES (5)..(5): NMeLeu
  MOD_RES (6)..(6): Pra
  MOD_RES (10)..(10): Oic
  MOD_RES (11)..(11): Nle
  MOD_RES (12)..(12): Oic
  MOD_RES (13)..(13): 4-Cl-F
ERPRLGHKGXLXF

SEQ ID NO: 1447 - protein, 13 aa, Artificial Sequence
  source: /note="Description of Artificial Sequence: Synthetic peptide"
  MOD_RES (1)..(1): PyroGlu
  MOD_RES (4)..(4): hArg
  MOD_RES (12)..(12): 1-Nal
ERPRLFHKGPFAF

SEQ ID NO: 1448 - protein, 13 aa, Artificial Sequence
  source: /note="Description of Artificial Sequence: Synthetic peptide"
  MOD_RES (1)..(1): PyroGlu
  MOD_RES (4)..(4): hArg
ERPRLFKKPPFPF

SEQ ID NO: 1449 - protein, 13 aa, Artificial Sequence
  source: /note="Description of Artificial Sequence: Synthetic peptide"
  MOD_RES (1)..(1): PyroGlu
  MOD_RES (5)..(5): Chg
ERPRGFHKPPFPF

SEQ ID NO: 1450 - protein, 13 aa, Artificial Sequence
  source: /note="Description of Artificial Sequence: Synthetic peptide"
  source: /note="N-term Bromoacetyl"
  MOD_RES (4)..(4): hArg
  MOD_RES (5)..(5): Cha
  MOD_RES (10)..(10): Oic
  MOD_RES (11)..(11): Nle
  MOD_RES (13)..(13): 4-Cl-F
LRPRASHKGXLPF

SEQ ID NO: 1451 - protein, 16 aa, Artificial Sequence
  source: /note="Description of Artificial Sequence: Synthetic peptide"
  source: /note="N-term Bromoacetyl"
  MOD_RES (2)..(3): hArg
  MOD_RES (5)..(5): hArg
  MOD_RES (7)..(7): hArg
  MOD_RES (8)..(8): Cha
  MOD_RES (13)..(13): Oic
  MOD_RES (14)..(14): Nle
  MOD_RES (16)..(16): 4-Cl-F
FRRQRPRASHKGXLPF

SEQ ID NO: 1452 - protein, 17 aa, Artificial Sequence
  source: /note="Description of Artificial Sequence: Synthetic peptide"
  source: /note="N-term Bromoacetyl"
  MOD_RES (1)..(1): Orn
  MOD_RES (3)..(4): hArg
  MOD_RES (6)..(6): hArg
  MOD_RES (8)..(8): hArg
  MOD_RES (9)..(9): Cha
  MOD_RES (14)..(14): Oic
  MOD_RES (15)..(15): Nle
  MOD_RES (17)..(17): 4-Cl-F
XFRRQRPRASHKGXLPF

SEQ ID NO: 1453 - protein, 13 aa, Artificial Sequence
  source: /note="Description of Artificial Sequence: Synthetic peptide"
  source: /note="N-term Bromoacetyl"
  MOD_RES (4)..(4): hArg
  MOD_RES (5)..(5): Cha
  MOD_RES (10)..(10): Oic
  MOD_RES (11)..(11): Nle
  MOD_RES (13)..(13): 4-Cl-F
QRPRASHKGXLPF

SEQ ID NO: 1454 - protein, 13 aa, Artificial Sequence
  source: /note="Description of Artificial Sequence: Synthetic peptide"
  source: /note="N-term Fc (E384C)-acetamide"
  MOD_RES (4)..(4): hArg
  MOD_RES (5)..(5): Cha
  MOD_RES (10)..(10): Oic
  MOD_RES (11)..(11): Nle
  MOD_RES (13)..(13): 4-Cl-F
QRPRASHKGXLPF

SEQ ID NO: 1455 - protein, 13 aa, Artificial Sequence
  source: /note="Description of Artificial Sequence: Synthetic peptide"
  source: /note="N-term Fc (T487C)-acetamide"
  MOD_RES (4)..(4): hArg
  MOD_RES (5)..(5): Cha
  MOD_RES (10)..(10): Oic
  MOD_RES (11)..(11): Nle
  MOD_RES (13)..(13): 4-Cl-F
QRPRASHKGXLPF

SEQ ID NO: 1456 - protein, 15 aa, Artificial Sequence
  source: /note="Description of Artificial Sequence: Synthetic peptide"
  source: /note="N-term Fc (E384C)-acetamide"
  MOD_RES (6)..(6): hArg
  MOD_RES (7)..(7): Cha
  MOD_RES (12)..(12): Oic
  MOD_RES (13)..(13): Nle
  MOD_RES (15)..(15): 4-Cl-F
GGQRPRASHKGXLPF

SEQ ID NO: 1457 - protein, 15 aa, Artificial Sequence
  source: /note="Description of Artificial Sequence: Synthetic peptide"
  source: /note="N-term Fc (T487C)-acetamide"
  MOD_RES (6)..(6): hArg
  MOD_RES (7)..(7): Cha
  MOD_RES (12)..(12): Oic
  MOD_RES (13)..(13): Nle
  MOD_RES (15)..(15): 4-Cl-F
GGQRPRASHKGXLPF

SEQ ID NO: 1458 - protein, 13 aa, Artificial Sequence
  source: /note="Description of Artificial Sequence: Synthetic peptide"
  source: /note="N-term Fc (E384C)-acetamide-AEEA"
  MOD_RES (4)..(4): hArg
  MOD_RES (5)..(5): Cha
  MOD_RES (10)..(10): Oic
  MOD_RES (11)..(11): Nle
  MOD_RES (13)..(13): 4-Cl-F
QRPRASHKGXLPF

SEQ ID NO: 1459 - protein, 13 aa, Artificial Sequence
  source: /note="Description of Artificial Sequence: Synthetic peptide"
  source: /note="N-term Fc (T487C)-acetamide-AEEA"
  MOD_RES (4)..(4): hArg
  MOD_RES (5)..(5): Cha
  MOD_RES (10)..(10): Oic
  MOD_RES (11)..(11): Nle
  MOD_RES (13)..(13): 4-Cl-F
QRPRASHKGXLPF

SEQ ID NO: 1460 - protein, 13 aa, Artificial Sequence
  source: /note="Description of Artificial Sequence: Synthetic peptide"
  source: /note="N-term Fc (E384C)-acetamide-PEG11"
  MOD_RES (4)..(4): hArg
  MOD_RES (5)..(5): Cha
  MOD_RES (10)..(10): Oic
  MOD_RES (11)..(11): Nle
  MOD_RES (13)..(13): 4-Cl-F
QRPRASHKGXLPF

SEQ ID NO: 1461 - protein, 13 aa, Artificial Sequence
  source: /note="Description of Artificial Sequence: Synthetic peptide"
  source: /note="N-term Fc (T487C)-acetamide-PEG11"
  MOD_RES (4)..(4): hArg
  MOD_RES (5)..(5): Cha
  MOD_RES (10)..(10): Oic
  MOD_RES (11)..(11): Nle
  MOD_RES (13)..(13): 4-Cl-F
QRPRASHKGXLPF

SEQ ID NO: 1462 - protein, 227 aa, Artificial Sequence
  source: /note="Description of Artificial Sequence: Synthetic polypeptide"
DKTHTCPPCPAPELLGGPSVFLFPPKPKDTLMISRTPEVTCVVVDVSHEDPEVKFNWYVDGVEVHNAKTKPREEQYNSTYRVVSVLTVLHQDWLNGKEYKCKVSNKALPAPIEKTISKAKGQPREPQVYTLPPSREEMCKNQVSLTCLVKGFYPSDIAVEWESNGQPENNYKTTPPVLDSDGSFFLYSKLTVDKSRWQQGNVFSCSVMHEALHNHYTQKSLSLSPGK

SEQ ID NO: 1463 - protein, 16 aa, Artificial Sequence
  source: /note="Description of Artificial Sequence: Synthetic peptide"
  source: /note="N-term Acetyl-NPeg11"
  MOD_RES (2)..(3): hArg
  MOD_RES (5)..(5): hArg
  MOD_RES (7)..(7): hArg
  MOD_RES (8)..(8): Cha
  MOD_RES (13)..(13): Oic
  MOD_RES (14)..(14): Nle
  MOD_RES (16)..(16): 4-Cl-F
FRRQRPRASHKGXLPF

SEQ ID NO: 1464 - protein, 16 aa, Artificial Sequence
  source: /note="Description of Artificial Sequence: Synthetic peptide"
  source: /note="N-term Acetyl-NPeg11"
  MOD_RES (2)..(3): hArg
  MOD_RES (5)..(5): hArg
  MOD_RES (7)..(7): hArg
  MOD_RES (8)..(8): Cha
  MOD_RES (13)..(13): Oic
  MOD_RES (14)..(14): Nle
  MOD_RES (15)..(15): 1-Nal
  MOD_RES (16)..(16): 4-Cl-F
FRRQRPRASHKGXLAF

SEQ ID NO: 1465 - protein, 16 aa, Artificial Sequence
  source: /note="Description of Artificial Sequence: Synthetic peptide"
  source: /note="N-term Acetyl-NPeg11"
  MOD_RES (2)..(3): hArg
  MOD_RES (5)..(5): hArg
  MOD_RES (7)..(7): hArg
  MOD_RES (8)..(8): Cha
  MOD_RES (13)..(13): Oic
  MOD_RES (14)..(14): Nle
  MOD_RES (16)..(16): 4-Cl-F
FRRLRPRASHKGXLPF

SEQ ID NO: 1466 - protein, 16 aa, Artificial Sequence
  source: /note="Description of Artificial Sequence: Synthetic peptide"
  source: /note="N-term Acetyl-NPeg11"
  MOD_RES (2)..(3): hArg
  MOD_RES (4)..(4): Nle
  MOD_RES (5)..(5): hArg
  MOD_RES (7)..(7): hArg
  MOD_RES (8)..(8): Cha
  MOD_RES (13)..(13): Oic
  MOD_RES (14)..(14): Nle
  MOD_RES (16)..(16): 4-Cl-F
FRRLRPRASHKGXLPF

SEQ ID NO: 1467 - protein, 16 aa, Artificial Sequence
  source: /note="Description of Artificial Sequence: Synthetic peptide"
  source: /note="N-term Acetyl-NPeg11"
  MOD_RES (2)..(3): hArg
  MOD_RES (5)..(5): hArg
  MOD_RES (7)..(7): hArg
  MOD_RES (8)..(8): Cha
  MOD_RES (9)..(9): NMeSer
  MOD_RES (13)..(13): Oic
  MOD_RES (14)..(14): Nle
  MOD_RES (16)..(16): 4-Cl-F
FRRQRPRASHKGXLPF

SEQ ID NO: 1468 - protein, 16 aa, Artificial Sequence
  source: /note="Description of Artificial Sequence: Synthetic peptide"
  source: /note="N-term Acetyl-NPeg11"
  MOD_RES (2)..(3): hArg
  MOD_RES (5)..(5): hArg
  MOD_RES (7)..(7): hArg
  MOD_RES (8)..(8): Cha
  MOD_RES (10)..(10): 2-Nal
  MOD_RES (13)..(13): Oic
  MOD_RES (14)..(14): Nle
  MOD_RES (16)..(16): 4-Cl-F
FRRQRPRASAKGXLPF

SEQ ID NO: 1469 - protein, 16 aa, Artificial Sequence
  source: /note="Description of Artificial Sequence: Synthetic peptide"
  source: /note="N-term Acetyl-NPeg11"
  MOD_RES (2)..(3): hArg
  MOD_RES (5)..(5): hArg
  MOD_RES (7)..(7): hArg
  MOD_RES (8)..(8): Cha
  MOD_RES (13)..(13): Oic
  MOD_RES (14)..(14): Nle
  MOD_RES (16)..(16): 4-Cl-F
FRRQRPRATHKGXLPF

SEQ ID NO: 1470 - protein, 16 aa, Artificial Sequence
  source: /note="Description of Artificial Sequence: Synthetic peptide"
  source: /note="N-term Acetyl-NPeg11"
  MOD_RES (2)..(3): hArg
  MOD_RES (5)..(5): hArg
  MOD_RES (7)..(7): hArg
  MOD_RES (8)..(8): Cha
  MOD_RES (10)..(10): 2-Nal
  MOD_RES (13)..(13): Oic
  MOD_RES (14)..(14): Nle
  MOD_RES (15)..(15): 1-Nal
  MOD_RES (16)..(16): 4-Cl-F
FRRLRPRASAKGXLAF

SEQ ID NO: 1471 - protein, 16 aa, Artificial Sequence
  source: /note="Description of Artificial Sequence: Synthetic peptide"
  source: /note="N-term Acetyl-NPeg11"
  MOD_RES (2)..(3): hArg
  MOD_RES (5)..(5): hArg
  MOD_RES (7)..(7): hArg
  MOD_RES (8)..(8): Cha
  MOD_RES (10)..(10): 2-Nal
  MOD_RES (13)..(13): Oic
  MOD_RES (14)..(14): Nle
  MOD_RES (15)..(15): 1-Nal
  MOD_RES (16)..(16): 4-Cl-F
FRRLRPRATAKGXLAF

SEQ ID NO: 1472 - protein, 16 aa, Artificial Sequence
  source: /note="Description of Artificial Sequence: Synthetic peptide"
  source: /note="N-term Acetyl-NPeg11"
  MOD_RES (2)..(3): hArg
  MOD_RES (5)..(5): hArg
  MOD_RES (7)..(7): hArg
  MOD_RES (8)..(8): Cha
  MOD_RES (13)..(13): Oic
  MOD_RES (14)..(14): Nle
  MOD_RES (15)..(15): 1-Nal
  MOD_RES (16)..(16): 4-Cl-F
FRRLRPRASAKGXLAF

SEQ ID NO: 1473 - protein, 16 aa, Artificial Sequence
  source: /note="Description of Artificial Sequence: Synthetic peptide"
  source: /note="N-term Acetyl-NPeg11"
  MOD_RES (2)..(3): hArg
  MOD_RES (5)..(5): hArg
  MOD_RES (7)..(7): hArg
  MOD_RES (8)..(8): Cha
  MOD_RES (13)..(13): Oic
  MOD_RES (14)..(14): Nle
  MOD_RES (16)..(16): 4-Cl-F
FRRLRPRASAKGXLPF

SEQ ID NO: 1474 - protein, 16 aa, Artificial Sequence
  source: /note="Description of Artificial Sequence: Synthetic peptide"
  source: /note="N-term Acetyl-NPeg11"
  MOD_RES (2)..(3): hArg
  MOD_RES (5)..(5): hArg
  MOD_RES (7)..(7): hArg
  MOD_RES (8)..(8): Cha
  MOD_RES (13)..(13): Oic
  MOD_RES (14)..(14): Nle
  MOD_RES (16)..(16): 4-Cl-F
FRRQRPRASHKGXLPF

SEQ ID NO: 1475 - protein, 16 aa, Artificial Sequence
  source: /note="Description of Artificial Sequence: Synthetic peptide"
  source: /note="N-term Acetyl-NPeg11"
  MOD_RES (2)..(3): hArg
  MOD_RES (5)..(5): hArg
  MOD_RES (7)..(7): hArg
  MOD_RES (8)..(8): Cha
  MOD_RES (9)..(9): Abu
  MOD_RES (13)..(13): Oic
  MOD_RES (14)..(14): Nle
  MOD_RES (16)..(16): 4-Cl-F
FRRQRPRAXHKGXLPF

SEQ ID NO: 1476 - protein, 16 aa, Artificial Sequence
  source: /note="Description of Artificial Sequence: Synthetic peptide"
  source: /note="N-term Acetyl-NPeg11"
  MOD_RES (2)..(3): hArg
  MOD_RES (5)..(5): hArg
  MOD_RES (7)..(7): hArg
  MOD_RES (8)..(8): Cha
  MOD_RES (9)..(9): Nle
  MOD_RES (13)..(13): Oic
  MOD_RES (14)..(14): Nle
  MOD_RES (16)..(16): 4-Cl-F
FRRQRPRALHKGXLPF

SEQ ID NO: 1477 - protein, 16 aa, Artificial Sequence
  source: /note="Description of Artificial Sequence: Synthetic peptide"
  source: /note="N-term Acetyl-NPeg11"
  MOD_RES (2)..(3): hArg
  MOD_RES (5)..(5): hArg
  MOD_RES (7)..(7): hArg
  MOD_RES (8)..(8): Cha
  MOD_RES (13)..(13): Oic
  MOD_RES (14)..(14): Nle
  MOD_RES (16)..(16): 4-Cl-F
FRRQRPRAVHKGXLPF

SEQ ID NO: 1478 - protein, 16 aa, Artificial Sequence
  source: /note="Description of Artificial Sequence: Synthetic peptide"
  source: /note="N-term Acetyl-NPeg11"
  MOD_RES (2)..(3): hArg
  MOD_RES (5)..(5): hArg
  MOD_RES (7)..(7): hArg
  MOD_RES (8)..(8): Cha
  MOD_RES (13)..(13): Oic
  MOD_RES (14)..(14): Nle
  MOD_RES (16)..(16): 4-Cl-F
FRRQRPRAYHKGXLPF

SEQ ID NO: 1479 - protein, 16 aa, Artificial Sequence
  source: /note="Description of Artificial Sequence: Synthetic peptide"
  source: /note="N-term Acetyl-NPeg11"
  MOD_RES (2)..(3): hArg
  MOD_RES (5)..(5): hArg
  MOD_RES (7)..(7): hArg
  MOD_RES (8)..(8): Cha
  MOD_RES (13)..(13): Oic
  MOD_RES (14)..(14): Nle
  MOD_RES (16)..(16): 4-Cl-F
FRRQRPRALHKGXLPF

SEQ ID NO: 1480 - protein, 16 aa, Artificial Sequence
  source: /note="Description of Artificial Sequence: Synthetic peptide"
  source: /note="N-term Acetyl-NPeg11"
  MOD_RES (2)..(3): hArg
  MOD_RES (5)..(5): hArg
  MOD_RES (7)..(7): hArg
  MOD_RES (8)..(8): Cha
  MOD_RES (13)..(13): Oic
  MOD_RES (14)..(14): Nle
  MOD_RES (16)..(16): 4-Cl-F
FRRQRPRAIHKGXLPF

SEQ ID NO: 1481 - protein, 16 aa, Artificial Sequence
  source: /note="Description of Artificial Sequence: Synthetic peptide"
  source: /note="N-term Acetyl-NPeg11"
  MOD_RES (2)..(3): hArg
  MOD_RES (5)..(5): hArg
  MOD_RES (7)..(7): hArg
  MOD_RES (8)..(8): Cha
  MOD_RES (9)..(9): 1-Nal
  MOD_RES (13)..(13): Oic
  MOD_RES (14)..(14): Nle
  MOD_RES (16)..(16): 4-Cl-F
FRRQRPRAAHKGXLPF

SEQ ID NO: 1482 - protein, 16 aa, Artificial Sequence
  source: /note="Description of Artificial Sequence: Synthetic peptide"
  source: /note="N-term Acetyl-NPeg11"
  MOD_RES (2)..(3): hArg
  MOD_RES (5)..(5): hArg
  MOD_RES (7)..(7): hArg
  MOD_RES (8)..(8): Cha
  MOD_RES (9)..(9): 2-Nal
  MOD_RES (13)..(13): Oic
  MOD_RES (14)..(14): Nle
  MOD_RES (16)..(16): 4-Cl-F
FRRQRPRAAHKGXLPF

SEQ ID NO: 1483 - protein, 16 aa, Artificial Sequence
  source: /note="Description of Artificial Sequence: Synthetic peptide"
  source: /note="N-term Acetyl-NPeg11"
  MOD_RES (2)..(3): hArg
  MOD_RES (5)..(5): hArg
  MOD_RES (7)..(7): hArg
  MOD_RES (8)..(8): Cha
  MOD_RES (9)..(9): Bip
  MOD_RES (13)..(13): Oic
  MOD_RES (14)..(14): Nle
  MOD_RES (16)..(16): 4-Cl-F
FRRQRPRAFHKGXLPF

SEQ ID NO: 1484 - protein, 16 aa, Artificial Sequence
  source: /note="Description of Artificial Sequence: Synthetic peptide"
  source: /note="N-term Acetyl-NPeg11"
  MOD_RES (2)..(3): hArg
  MOD_RES (5)..(5): hArg
  MOD_RES (7)..(7): hArg
  MOD_RES (8)..(8): Cha
  MOD_RES (13)..(13): Oic
  MOD_RES (14)..(14): Nle
  MOD_RES (16)..(16): 4-Cl-F
FRRQRPRAFHKGXLPF

SEQ ID NO: 1485 - protein, 16 aa, Artificial Sequence
  source: /note="Description of Artificial Sequence: Synthetic peptide"
  source: /note="N-term Acetyl-NPeg11"
  MOD_RES (2)..(3): hArg
  MOD_RES (5)..(5): hArg
  MOD_RES (7)..(7): hArg
  MOD_RES (8)..(8): Cha
  MOD_RES (13)..(13): Oic
  MOD_RES (14)..(14): Nle
  MOD_RES (16)..(16): 4-Cl-F
FRRQRPRASHKGXLPF

SEQ ID NO: 1486 - protein, 16 aa, Artificial Sequence
  source: /note="Description of Artificial Sequence: Synthetic peptide"
  source: /note="N-term Acetyl-NPeg11"
  MOD_RES (2)..(3): hArg
  MOD_RES (5)..(5): hArg
  MOD_RES (7)..(7): hArg
  MOD_RES (8)..(8): Cha
  MOD_RES (13)..(13): Oic
  MOD_RES (14)..(14): Nle
  MOD_RES (16)..(16): 4-Cl-F
FRRQRPRASAKGXLPF

SEQ ID NO: 1487 - protein, 16 aa, Artificial Sequence
  source: /note="Description of Artificial Sequence: Synthetic peptide"
  source: /note="N-term Acetyl-NPeg11"
  MOD_RES (2)..(3): hArg
  MOD_RES (5)..(5): hArg
  MOD_RES (7)..(7): hArg
  MOD_RES (8)..(8): Cha
  MOD_RES (10)..(10): Abu
  MOD_RES (13)..(13): Oic
  MOD_RES (14)..(14): Nle
  MOD_RES (16)..(16): 4-Cl-F
FRRQRPRASXKGXLPF

SEQ ID NO: 1488 - protein, 16 aa, Artificial Sequence
  source: /note="Description of Artificial Sequence: Synthetic peptide"
  source: /note="N-term Acetyl-NPeg11"
  MOD_RES (2)..(3): hArg
  MOD_RES (5)..(5): hArg
  MOD_RES (7)..(7): hArg
  MOD_RES (8)..(8): Cha
  MOD_RES (10)..(10): Nle
  MOD_RES (13)..(13): Oic
  MOD_RES (14)..(14): Nle
  MOD_RES (16)..(16): 4-Cl-F
FRRQRPRASLKGXLPF

SEQ ID NO: 1489 - protein, 16 aa, Artificial Sequence
  source: /note="Description of Artificial Sequence: Synthetic peptide"
  source: /note="N-term Acetyl-NPeg11"
  MOD_RES (2)..(3): hArg
  MOD_RES (5)..(5): hArg
  MOD_RES (7)..(7): hArg
  MOD_RES (8)..(8): Cha
  MOD_RES (13)..(13): Oic
  MOD_RES (14)..(14): Nle
  MOD_RES (16)..(16): 4-Cl-F
FRRQRPRASVKGXLPF

SEQ ID NO: 1490 - protein, 16 aa, Artificial Sequence
  source: /note="Description of Artificial Sequence: Synthetic peptide"
  source: /note="N-term Acetyl-NPeg11"
  MOD_RES (2)..(3): hArg
  MOD_RES (5)..(5): hArg
  MOD_RES (7)..(7): hArg
  MOD_RES (8)..(8): Cha
  MOD_RES (13)..(13): Oic
  MOD_RES (14)..(14): Nle
  MOD_RES (16)..(16): 4-Cl-F
FRRQRPRASYKGXLPF

SEQ ID NO: 1491 - protein, 16 aa, Artificial Sequence
  source: /note="Description of Artificial Sequence: Synthetic peptide"
  source: /note="N-term Acetyl-NPeg11"
  MOD_RES (2)..(3): hArg
  MOD_RES (5)..(5): hArg
  MOD_RES (7)..(7): hArg
  MOD_RES (8)..(8): Cha
  MOD_RES (10)..(10): Cha
  MOD_RES (13)..(13): Oic
  MOD_RES (14)..(14): Nle
  MOD_RES (16)..(16): 4-Cl-F
FRRQRPRASAKGXLPF

SEQ ID NO: 1492 - protein, 16 aa, Artificial Sequence
  source: /note="Description of Artificial Sequence: Synthetic peptide"
  source: /note="N-term Acetyl-NPeg11"
  MOD_RES (2)..(3): hArg
  MOD_RES (5)..(5): hArg
  MOD_RES (7)..(7): hArg
  MOD_RES (8)..(8): Cha
  MOD_RES (13)..(13): Oic
  MOD_RES (14)..(14): Nle
  MOD_RES (16)..(16): 4-Cl-F
FRRQRPRASLKGXLPF

SEQ ID NO: 1493 - protein, 16 aa, Artificial Sequence
  source: /note="Description of Artificial Sequence: Synthetic peptide"
  source: /note="N-term Acetyl-NPeg11"
  MOD_RES (2)..(3): hArg
  MOD_RES (5)..(5): hArg
  MOD_RES (7)..(7): hArg
  MOD_RES (8)..(8): Cha
  MOD_RES (13)..(13): Oic
  MOD_RES (14)..(14): Nle
  MOD_RES (16)..(16): 4-Cl-F
FRRQRPRASIKGXLPF

SEQ ID NO: 1494 - protein, 16 aa, Artificial Sequence
  source: /note="Description of Artificial Sequence: Synthetic peptide"
  source: /note="N-term Acetyl-NPeg11"
  MOD_RES (2)..(3): hArg
  MOD_RES (5)..(5): hArg
  MOD_RES (7)..(7): hArg
  MOD_RES (8)..(8): Cha
  MOD_RES (13)..(13): Oic
  MOD_RES (14)..(14): Nle
  MOD_RES (16)..(16): 4-Cl-F
FRRQRPRASFKGXLPF

SEQ ID NO: 1495 - protein, 16 aa, Artificial Sequence
  source: /note="Description of Artificial Sequence: Synthetic peptide"
  source: /note="N-term Acetyl-NPeg11"
  MOD_RES (2)..(3): hArg
  MOD_RES (5)..(5): hArg
  MOD_RES (7)..(7): hArg
  MOD_RES (8)..(8): Cha
  MOD_RES (10)..(10): 2Pal
  MOD_RES (13)..(13): Oic
  MOD_RES (14)..(14): Nle
  MOD_RES (16)..(16): 4-Cl-F
FRRQRPRASAKGXLPF

SEQ ID NO: 1496 - protein, 16 aa, Artificial Sequence
  source: /note="Description of Artificial Sequence: Synthetic peptide"
  source: /note="N-term Acetyl-NPeg11"
  MOD_RES (2)..(3): hArg
  MOD_RES (5)..(5): hArg
  MOD_RES (7)..(7): hArg
  MOD_RES (8)..(8): Cha
  MOD_RES (10)..(10): 1-Nal
  MOD_RES (13)..(13): Oic
  MOD_RES (14)..(14): Nle
  MOD_RES (16)..(16): 4-Cl-F
FRRQRPRASAKGXLPF

SEQ ID NO: 1497 - protein, 16 aa, Artificial Sequence
  source: /note="Description of Artificial Sequence: Synthetic peptide"
  source: /note="N-term Acetyl-NPeg11"
  MOD_RES (2)..(3): hArg
  MOD_RES (5)..(5): hArg
  MOD_RES (7)..(7): hArg
  MOD_RES (8)..(8): Cha
  MOD_RES (10)..(10): 3Pal
  MOD_RES (13)..(13): Oic
  MOD_RES (14)..(14): Nle
  MOD_RES (16)..(16): 4-Cl-F
FRRQRPRASAKGXLPF

SEQ ID NO: 1498 - protein, 16 aa, Artificial Sequence
  source: /note="Description of Artificial Sequence: Synthetic peptide"
  source: /note="N-term Acetyl-NPeg11"
  MOD_RES (2)..(3): hArg
  MOD_RES (5)..(5): hArg
  MOD_RES (7)..(7): hArg
  MOD_RES (8)..(8): Cha
  MOD_RES (10)..(10): Bip
  MOD_RES (13)..(13): Oic
  MOD_RES (14)..(14): Nle
  MOD_RES (16)..(16): 4-Cl-F
FRRQRPRASFKGXLPF

SEQ ID NO: 1499 - protein, 17 aa, Artificial Sequence
  source: /note="Description of Artificial Sequence: Synthetic peptide"
  source: /note="N-term Acetyl-NPeg11"
  MOD_RES (1)..(1): Orn
  MOD_RES (3)..(4): hArg
  MOD_RES (6)..(6): hArg
  MOD_RES (8)..(8): hArg
  MOD_RES (9)..(9): Cha
  MOD_RES (14)..(14): Oic
  MOD_RES (15)..(15): Nle
  MOD_RES (17)..(17): 4-Cl-F
XFRRQRPRASHKGXLPF

SEQ ID NO: 1500 - protein, 17 aa, Artificial Sequence
  source: /note="Description of Artificial Sequence: Synthetic peptide"
  source: /note="N-term Acetyl-NPeg11"
  MOD_RES (1)..(1): Orn
  MOD_RES (3)..(4): hArg
  MOD_RES (6)..(6): hArg
  MOD_RES (8)..(8): hArg
  MOD_RES (9)..(9): Cha
  MOD_RES (14)..(14): Oic
  MOD_RES (15)..(15): Nle
  MOD_RES (17)..(17): 4-Cl-F
XFRRLRPRASHKGXLPF

SEQ ID NO: 1501 - protein, 17 aa, Artificial Sequence
  source: /note="Description of Artificial Sequence: Synthetic peptide"
  source: /note="N-term Acetyl-NPeg11"
  MOD_RES (1)..(1): Orn
  MOD_RES (3)..(4): hArg
  MOD_RES (5)..(5): Nle
  MOD_RES (6)..(6): hArg
  MOD_RES (8)..(8): hArg
  MOD_RES (9)..(9): Cha
  MOD_RES (14)..(14): Oic
  MOD_RES (15)..(15): Nle
  MOD_RES (17)..(17): 4-Cl-F
XFRRLRPRASHKGXLPF

SEQ ID NO: 1502 - protein, 17 aa, Artificial Sequence
  source: /note="Description of Artificial Sequence: Synthetic peptide"
  source: /note="N-term Acetyl-NPeg11"
  MOD_RES (1)..(1): Orn
  MOD_RES (3)..(4): hArg
  MOD_RES (6)..(6): hArg
  MOD_RES (8)..(8): hArg
  MOD_RES (9)..(9): Cha
  MOD_RES (10)..(10): NMeSer
  MOD_RES (14)..(14): Oic
  MOD_RES (15)..(15): Nle
  MOD_RES (17)..(17): 4-Cl-F
XFRRQRPRASHKGXLPF

SEQ ID NO: 1503 - protein, 17 aa, Artificial Sequence
  source: /note="Description of Artificial Sequence: Synthetic peptide"
  source: /note="N-term Acetyl-NPeg11"
  MOD_RES (1)..(1): Orn
  MOD_RES (3)..(4): hArg
  MOD_RES (6)..(6): hArg
  MOD_RES (8)..(8): hArg
  MOD_RES (9)..(9): Cha
  MOD_RES (11)..(11): 2-Nal
  MOD_RES (14)..(14): Oic
  MOD_RES (15)..(15): Nle
  MOD_RES (17)..(17): 4-Cl-F
XFRRQRPRASAKGXLPF

SEQ ID NO: 1504 - protein, 17 aa, Artificial Sequence
  source: /note="Description of Artificial Sequence: Synthetic peptide"
  source: /note="N-term Acetyl-NPeg11"
  MOD_RES (1)..(1): Orn
  MOD_RES (3)..(4): hArg
  MOD_RES (6)..(6): hArg
  MOD_RES (8)..(8): hArg
  MOD_RES (9)..(9): Cha
  MOD_RES (14)..(14): Oic
  MOD_RES (15)..(15): Nle
  MOD_RES (17)..(17): 4-Cl-F
XFRRQRPRATHKGXLPF

SEQ ID NO: 1505 - protein, 17 aa, Artificial Sequence
  source: /note="Description of Artificial Sequence: Synthetic peptide"
  source: /note="N-term Acetyl-NPeg11"
  MOD_RES (1)..(1): Orn
  MOD_RES (3)..(4): hArg
  MOD_RES (6)..(6): hArg
  MOD_RES (8)..(8): hArg
  MOD_RES (9)..(9): Cha
  MOD_RES (14)..(14): Oic
  MOD_RES (15)..(15): Nle
  MOD_RES (16)..(16): 1-Nal
  MOD_RES (17)..(17): 4-Cl-F
XFRRQRPRASHKGXLAF

SEQ ID NO: 1506 - protein, 17 aa, Artificial Sequence
  source: /note="Description of Artificial Sequence: Synthetic peptide"
  source: /note="N-term Acetyl-NPeg11"
  MOD_RES (1)..(1): Orn
  MOD_RES (3)..(4): hArg
  MOD_RES (6)..(6): hArg
  MOD_RES (8)..(8): hArg
  MOD_RES (9)..(9): Cha
  MOD_RES (11)..(11): 2-Nal
  MOD_RES (14)..(14): Oic
  MOD_RES (15)..(15): Nle
  MOD_RES (16)..(16): 1-Nal
  MOD_RES (17)..(17): 4-Cl-F
XFRRLRPRASAKGXLAF

SEQ ID NO: 1507 - protein, 17 aa, Artificial Sequence
  source: /note="Description of Artificial Sequence: Synthetic peptide"
  source: /note="N-term Acetyl-NPeg11"
  MOD_RES (1)..(1): Orn
  MOD_RES (3)..(4): hArg
  MOD_RES (6)..(6): hArg
  MOD_RES (8)..(8): hArg
  MOD_RES (9)..(9): Cha
  MOD_RES (11)..(11): 2-Nal
  MOD_RES (14)..(14): Oic
  MOD_RES (15)..(15): Nle
  MOD_RES (16)..(16): 1-Nal
  MOD_RES (17)..(17): 4-Cl-F
XFRRLRPRATAKGXLAF

SEQ ID NO: 1508 - protein, 17 aa, Artificial Sequence
  source: /note="Description of Artificial Sequence: Synthetic peptide"
  source: /note="N-term Acetyl-NPeg11"
  MOD_RES (1)..(1): Orn
  MOD_RES (3)..(4): hArg
  MOD_RES (6)..(6): hArg
  MOD_RES (8)..(8): hArg
  MOD_RES (9)..(9): Cha
  MOD_RES (14)..(14): Oic
  MOD_RES (15)..(15): Nle
  MOD_RES (16)..(16): 1-Nal
  MOD_RES (17)..(17): 4-Cl-F
XFRRLRPRASAKGXLAF

SEQ ID NO: 1509 - protein, 17 aa, Artificial Sequence
  source: /note="Description of Artificial Sequence: Synthetic peptide"
  source: /note="N-term Acetyl-NPeg11"
  MOD_RES (1)..(1): Orn
  MOD_RES (3)..(4): hArg
  MOD_RES (6)..(6): hArg
  MOD_RES (8)..(8): hArg
  MOD_RES (9)..(9): Cha
  MOD_RES (14)..(14): Oic
  MOD_RES (15)..(15): Nle
  MOD_RES (17)..(17): 4-Cl-F
XFRRLRPRASAKGXLPF

SEQ ID NO: 1510 - protein, 17 aa, Artificial Sequence
  source: /note="Description of Artificial Sequence: Synthetic peptide"
  source: /note="N-term Acetyl-NPeg11"
  MOD_RES (1)..(1): Orn
  MOD_RES (3)..(4): hArg
  MOD_RES (6)..(6): hArg
  MOD_RES (8)..(8): hArg
  MOD_RES (9)..(9): Cha
  MOD_RES (14)..(14): Oic
  MOD_RES (15)..(15): Nle
  MOD_RES (17)..(17): 4-Cl-F
XFRRQRPRASHKGXLPF

SEQ ID NO: 1511 - protein, 17 aa, Artificial Sequence
  source: /note="Description of Artificial Sequence: Synthetic peptide"
  source: /note="N-term Acetyl-NPeg11"
  MOD_RES (1)..(1): Orn
  MOD_RES (3)..(4): hArg
  MOD_RES (6)..(6): hArg
  MOD_RES (8)..(8): hArg
  MOD_RES (9)..(9): Cha
  MOD_RES (10)..(10): Abu
  MOD_RES (14)..(14): Oic
  MOD_RES (15)..(15): Nle
  MOD_RES (17)..(17): 4-Cl-F
XFRRQRPRAXHKGXLPF

SEQ ID NO: 1512 - protein, 17 aa, Artificial Sequence
  source: /note="Description of Artificial Sequence: Synthetic peptide"
  source: /note="N-term Acetyl-NPeg11"
  MOD_RES (1)..(1): Orn
  MOD_RES (3)..(4): hArg
  MOD_RES (6)..(6): hArg
  MOD_RES (8)..(8): hArg
  MOD_RES (9)..(9): Cha
  MOD_RES (10)..(10): Nle
  MOD_RES (14)..(14): Oic
  MOD_RES (15)..(15): Nle
  MOD_RES (17)..(17): 4-Cl-F
XFRRQRPRALHKGXLPF

SEQ ID NO: 1513 - protein, 17 aa, Artificial Sequence
  source: /note="Description of Artificial Sequence: Synthetic peptide"
  source: /note="N-term Acetyl-NPeg11"
  MOD_RES (1)..(1): Orn
  MOD_RES (3)..(4): hArg
  MOD_RES (6)..(6): hArg
  MOD_RES (8)..(8): hArg
  MOD_RES (9)..(9): Cha
  MOD_RES (14)..(14): Oic
  MOD_RES (15)..(15): Nle
  MOD_RES (17)..(17): 4-Cl-F
XFRRQRPRAVHKGXLPF

SEQ ID NO: 1514 - protein, 17 aa, Artificial Sequence
  source: /note="Description of Artificial Sequence: Synthetic peptide"
  source: /note="N-term Acetyl-NPeg11"
  MOD_RES (1)..(1): Orn
  MOD_RES (3)..(4): hArg
  MOD_RES (6)..(6): hArg
  MOD_RES (8)..(8): hArg
  MOD_RES (9)..(9): Cha
  MOD_RES (14)..(14): Oic
  MOD_RES (15)..(15): Nle
  MOD_RES (17)..(17): 4-Cl-F
XFRRQRPRAYHKGXLPF

SEQ ID NO: 1515 - protein, 17 aa, Artificial Sequence
  source: /note="Description of Artificial Sequence: Synthetic peptide"
  source: /note="N-term Acetyl-NPeg11"
  MOD_RES (1)..(1): Orn
  MOD_RES (3)..(4): hArg
  MOD_RES (6)..(6): hArg
  MOD_RES (8)..(8): hArg
  MOD_RES (9)..(9): Cha
  MOD_RES (14)..(14): Oic
  MOD_RES (15)..(15): Nle
  MOD_RES (17)..(17): 4-Cl-F
XFRRQRPRALHKGXLPF

SEQ ID NO: 1516 - protein, 17 aa, Artificial Sequence
  source: /note="Description of Artificial Sequence: Synthetic peptide"
  source: /note="N-term Acetyl-NPeg11"
  MOD_RES (1)..(1): Orn
  MOD_RES (3)..(4): hArg
  MOD_RES (6)..(6): hArg
  MOD_RES (8)..(8): hArg
  MOD_RES (9)..(9): Cha
  MOD_RES (14)..(14): Oic
  MOD_RES (15)..(15): Nle
  MOD_RES (17)..(17): 4-Cl-F
XFRRQRPRAIHKGXLPF

SEQ ID NO: 1517 - protein, 17 aa, Artificial Sequence
  source: /note="Description of Artificial Sequence: Synthetic peptide"
  source: /note="N-term Acetyl-NPeg11"
  MOD_RES (1)..(1): Orn
  MOD_RES (3)..(4): hArg
  MOD_RES (6)..(6): hArg
  MOD_RES (8)..(8): hArg
  MOD_RES (9)..(9): Cha
  MOD_RES (10)..(10): 1-Nal
  MOD_RES (14)..(14): Oic
  MOD_RES (15)..(15): Nle
  MOD_RES (17)..(17): 4-Cl-F
XFRRQRPRAAHKGXLPF

SEQ ID NO: 1518 - protein, 17 aa, Artificial Sequence
  source: /note="Description of Artificial Sequence: Synthetic peptide"
  source: /note="N-term Acetyl-NPeg11"
  MOD_RES (1)..(1): Orn
  MOD_RES (3)..(4): hArg
  MOD_RES (6)..(6): hArg
  MOD_RES (8)..(8): hArg
  MOD_RES (9)..(9): Cha
  MOD_RES (10)..(10): 2-Nal
  MOD_RES (14)..(14): Oic
  MOD_RES (15)..(15): Nle
  MOD_RES (17)..(17): 4-Cl-F
XFRRQRPRAAHKGXLPF

SEQ ID NO: 1519 - protein, 17 aa, Artificial Sequence
  source: /note="Description of Artificial Sequence: Synthetic peptide"
  source: /note="N-term Acetyl-NPeg11"
  MOD_RES (1)..(1): Orn
  MOD_RES (3)..(4): hArg
  MOD_RES (6)..(6): hArg
  MOD_RES (8)..(8): hArg
  MOD_RES (9)..(9): Cha
  MOD_RES (10)..(10): Bip
  MOD_RES (14)..(14): Oic
  MOD_RES (15)..(15): Nle
  MOD_RES (17)..(17): 4-Cl-F
XFRRQRPRAFHKGXLPF

SEQ ID NO: 1520 - protein, 17 aa, Artificial Sequence
  source: /note="Description of Artificial Sequence: Synthetic peptide"
  source: /note="N-term Acetyl-NPeg11"
  MOD_RES (1)..(1): Orn
  MOD_RES (3)..(4): hArg
  MOD_RES (6)..(6): hArg
  MOD_RES (8)..(8): hArg
  MOD_RES (9)..(9): Cha
  MOD_RES (14)..(14): Oic
  MOD_RES (15)..(15): Nle
  MOD_RES (17)..(17): 4-Cl-F
XFRRQRPRAFHKGXLPF

SEQ ID NO: 1521 - protein, 17 aa, Artificial Sequence
  source: /note="Description of Artificial Sequence: Synthetic peptide"
  source: /note="N-term Acetyl-NPeg11"
  MOD_RES (1)..(1): Orn
  MOD_RES (3)..(4): hArg
  MOD_RES (6)..(6): hArg
  MOD_RES (8)..(8): hArg
  MOD_RES (9)..(9): Cha
  MOD_RES (14)..(14): Oic
  MOD_RES (15)..(15): Nle
  MOD_RES (17)..(17): 4-Cl-F
XFRRQRPRASHKGXLPF

SEQ ID NO: 1522 - protein, 17 aa, Artificial Sequence
  source: /note="Description of Artificial Sequence: Synthetic peptide"
  source: /note="N-term Acetyl-NPeg11"
  MOD_RES (1)..(1): Orn
  MOD_RES (3)..(4): hArg
  MOD_RES (6)..(6): hArg
  MOD_RES (8)..(8): hArg
  MOD_RES (9)..(9): Cha
  MOD_RES (14)..(14): Oic
  MOD_RES (15)..(15): Nle
  MOD_RES (17)..(17): 4-Cl-F
XFRRQRPRASAKGXLPF

SEQ ID NO: 1523 - protein, 17 aa, Artificial Sequence
  source: /note="Description of Artificial Sequence: Synthetic peptide"
  source: /note="N-term Acetyl-NPeg11"
  MOD_RES (1)..(1): Orn
  MOD_RES (3)..(4): hArg
  MOD_RES (6)..(6): hArg
  MOD_RES (8)..(8): hArg
  MOD_RES (9)..(9): Cha
  MOD_RES (11)..(11): Abu
  MOD_RES (14)..(14): Oic
  MOD_RES (15)..(15): Nle
  MOD_RES (17)..(17): 4-Cl-F
XFRRQRPRASXKGXLPF

SEQ ID NO: 1524 - protein, 17 aa, Artificial Sequence
  source: /note="Description of Artificial Sequence: Synthetic peptide"
  source: /note="N-term Acetyl-NPeg11"
  MOD_RES (1)..(1): Orn
  MOD_RES (3)..(4): hArg
  MOD_RES (6)..(6): hArg
  MOD_RES (8)..(8): hArg
  MOD_RES (9)..(9): Cha
  MOD_RES (11)..(11): Nle
  MOD_RES (14)..(14): Oic
  MOD_RES (15)..(15): Nle
  MOD_RES (17)..(17): 4-Cl-F
XFRRQRPRASLKGXLPF

SEQ ID NO: 1525 - protein, 17 aa, Artificial Sequence
  source: /note="Description of Artificial Sequence: Synthetic peptide"
  source: /note="N-term Acetyl-NPeg11"
  MOD_RES (1)..(1): Orn
  MOD_RES (3)..(4): hArg
  MOD_RES (6)..(6): hArg
  MOD_RES (8)..(8): hArg
  MOD_RES (9)..(9): Cha
  MOD_RES (14)..(14): Oic
  MOD_RES (15)..(15): Nle
  MOD_RES (17)..(17): 4-Cl-F
XFRRQRPRASVKGXLPF

SEQ ID NO: 1526 - protein, 17 aa, Artificial Sequence
  source: /note="Description of Artificial Sequence: Synthetic peptide"
  source: /note="N-term Acetyl-NPeg11"
  MOD_RES (1)..(1): Orn
  MOD_RES (3)..(4): hArg
  MOD_RES (6)..(6): hArg
  MOD_RES (8)..(8): hArg
  MOD_RES (9)..(9): Cha
  MOD_RES (14)..(14): Oic
  MOD_RES (15)..(15): Nle
  MOD_RES (17)..(17): 4-Cl-F
XFRRQRPRASYKGXLPF

SEQ ID NO: 1527 - protein, 17 aa, Artificial Sequence
  source: /note="Description of Artificial Sequence: Synthetic peptide"
  source: /note="N-term Acetyl-NPeg11"
  MOD_RES (1)..(1): Orn
  MOD_RES (3)..(4): hArg
  MOD_RES (6)..(6): hArg
  MOD_RES (8)..(8): hArg
  MOD_RES (9)..(9): Cha
  MOD_RES (11)..(11): Cha
  MOD_RES (14)..(14): Oic
  MOD_RES (15)..(15): Nle
  MOD_RES (17)..(17): 4-Cl-F
XFRRQRPRASAKGXLPF

SEQ ID NO: 1528 - protein, 17 aa, Artificial Sequence
  source: /note="Description of Artificial Sequence: Synthetic peptide"
  source: /note="N-term Acetyl-NPeg11"
  MOD_RES (1)..(1): Orn
  MOD_RES (3)..(4): hArg
  MOD_RES (6)..(6): hArg
  MOD_RES (8)..(8): hArg
  MOD_RES (9)..(9): Cha
  MOD_RES (14)..(14): Oic
  MOD_RES (15)..(15): Nle
  MOD_RES (17)..(17): 4-Cl-F
XFRRQRPRASLKGXLPF

SEQ ID NO: 1529 - protein, 17 aa, Artificial Sequence
  source: /note="Description of Artificial Sequence: Synthetic peptide"
  source: /note="N-term Acetyl-NPeg11"
  MOD_RES (1)..(1): Orn
  MOD_RES (3)..(4): hArg
  MOD_RES (6)..(6): hArg
  MOD_RES (8)..(8): hArg
  MOD_RES (9)..(9): Cha
  MOD_RES (14)..(14): Oic
  MOD_RES (15)..(15): Nle
  MOD_RES (17)..(17): 4-Cl-F
XFRRQRPRASIKGXLPF

SEQ ID NO: 1530 - protein, 17 aa, Artificial Sequence
  source: /note="Description of Artificial Sequence: Synthetic peptide"
  source: /note="N-term Acetyl-NPeg11"
  MOD_RES (1)..(1): Orn
  MOD_RES (3)..(4): hArg
  MOD_RES (6)..(6): hArg
  MOD_RES (8)..(8): hArg
  MOD_RES (9)..(9): Cha
  MOD_RES (14)..(14): Oic
  MOD_RES (15)..(15): Nle
  MOD_RES (17)..(17): 4-Cl-F
XFRRQRPRASFKGXLPF

SEQ ID NO: 1531 - protein, 17 aa, Artificial Sequence
  source: /note="Description of Artificial Sequence: Synthetic peptide"
  source: /note="N-term Acetyl-NPeg11"
  MOD_RES (1)..(1): Orn
  MOD_RES (3)..(4): hArg
  MOD_RES (6)..(6): hArg
  MOD_RES (8)..(8): hArg
  MOD_RES (9)..(9): Cha
  MOD_RES (11)..(11): 2Pal
  MOD_RES (14)..(14): Oic
  MOD_RES (15)..(15): Nle
  MOD_RES (17)..(17): 4-Cl-F
XFRRQRPRASAKGXLPF

SEQ ID NO: 1532 - protein, 17 aa, Artificial Sequence
  source: /note="Description of Artificial Sequence: Synthetic peptide"
  source: /note="N-term Acetyl-NPeg11"
  MOD_RES (1)..(1): Orn
  MOD_RES (3)..(4): hArg
  MOD_RES (6)..(6): hArg
  MOD_RES (8)..(8): hArg
  MOD_RES (9)..(9): Cha
  MOD_RES (11)..(11): 1-Nal
  MOD_RES (14)..(14): Oic
  MOD_RES (15)..(15): Nle
  MOD_RES (17)..(17): 4-Cl-F
XFRRQRPRASAKGXLPF

SEQ ID NO: 1533 - protein, 17 aa, Artificial Sequence
  source: /note="Description of Artificial Sequence: Synthetic peptide"
  source: /note="N-term Acetyl-NPeg11"
  MOD_RES (1)..(1): Orn
  MOD_RES (3)..(4): hArg
  MOD_RES (6)..(6): hArg
  MOD_RES (8)..(8): hArg
  MOD_RES (9)..(9): Cha
  MOD_RES (11)..(11): 3Pal
  MOD_RES (14)..(14): Oic
  MOD_RES (15)..(15): Nle
  MOD_RES (17)..(17): 4-Cl-F
XFRRQRPRASAKGXLPF

SEQ ID NO: 1534 - protein, 17 aa, Artificial Sequence
  source: /note="Description of Artificial Sequence: Synthetic peptide"
  source: /note="N-term Acetyl-NPeg11"
  MOD_RES (1)..(1): Orn
  MOD_RES (3)..(4): hArg
  MOD_RES (6)..(6): hArg
  MOD_RES (8)..(8): hArg
  MOD_RES (9)..(9): Cha
  MOD_RES (11)..(11): Bip
  MOD_RES (14)..(14): Oic
  MOD_RES (15)..(15): Nle
  MOD_RES (17)..(17): 4-Cl-F
XFRRQRPRASFKGXLPF

SEQ ID NO: 1535 - protein, 16 aa, Artificial Sequence
  source: /note="Description of Artificial Sequence: Synthetic peptide"
  source: /note="N-term Acetyl-NPeg11"
  MOD_RES (2)..(3): hArg
  MOD_RES (5)..(5): hArg
  MOD_RES (7)..(7): hArg
  MOD_RES (8)..(8): Cha
  MOD_RES (13)..(13): Oic
  MOD_RES (14)..(14): Nle
  MOD_RES (15)..(15): 1-Nal
  MOD_RES (16)..(16): 4-Cl-F
FRRLRPRASAKGXLAF

SEQ ID NO: 1536 - protein, 16 aa, Artificial Sequence
  source: /note="Description of Artificial Sequence: Synthetic peptide"
  source: /note="N-term Acetyl-NPeg11"
  MOD_RES (2)..(3): hArg
  MOD_RES (5)..(5): hArg
  MOD_RES (7)..(7): hArg
  MOD_RES (8)..(8): Cha
  MOD_RES (10)..(10): Cha
  MOD_RES (13)..(13): Oic
  MOD_RES (14)..(14): Nle
  MOD_RES (15)..(15): 1-Nal
  MOD_RES (16)..(16): 4-Cl-F
FRRLRPRASAKGXLAF

SEQ ID NO: 1537 - protein, 16 aa, Artificial Sequence
  source: /note="Description of Artificial Sequence: Synthetic peptide"
  source: /note="N-term Acetyl-NPeg11"
  MOD_RES (2)..(3): hArg
  MOD_RES (5)..(5): hArg
  MOD_RES (7)..(7): hArg
  MOD_RES (8)..(8): Cha
  MOD_RES (9)..(9): NMeSer
  MOD_RES (13)..(13): Oic
  MOD_RES (14)..(14): Nle
  MOD_RES (15)..(15): 1-Nal
  MOD_RES (16)..(16): 4-Cl-F
FRRLRPRASAKGXLAF

SEQ ID NO: 1538 - protein, 16 aa, Artificial Sequence
  source: /note="Description of Artificial Sequence: Synthetic peptide"
  source: /note="N-term Acetyl-NPeg11"
  MOD_RES (2)..(3): hArg
  MOD_RES (5)..(5): hArg
  MOD_RES (7)..(7): hArg
  MOD_RES (8)..(8): Cha
  MOD_RES (9)..(9): NMeSer
  MOD_RES (10)..(10): Cha
  MOD_RES (13)..(13): Oic
  MOD_RES (14)..(14): Nle
  MOD_RES (15)..(15): 1-Nal
  MOD_RES (16)..(16): 4-Cl-F
FRRLRPRASAKGXLAF

SEQ ID NO: 1539 - protein, 17 aa, Artificial Sequence
  source: /note="Description of Artificial Sequence: Synthetic peptide"
  source: /note="N-term Acetyl-NPeg11"
  MOD_RES (1)..(1): Orn
  MOD_RES (3)..(4): hArg
  MOD_RES (6)..(6): hArg
  MOD_RES (8)..(8): hArg
  MOD_RES (9)..(9): Cha
  MOD_RES (14)..(14): Oic
  MOD_RES (15)..(15): Nle
  MOD_RES (16)..(16): 1-Nal
  MOD_RES (17)..(17): 4-Cl-F
XFRRLRPRASAKGXLAF

SEQ ID NO: 1540 - protein, 17 aa, Artificial Sequence
  source: /note="Description of Artificial Sequence: Synthetic peptide"
  source: /note="N-term Acetyl-NPeg11"
  MOD_RES (1)..(1): Orn
  MOD_RES (3)..(4): hArg
  MOD_RES (6)..(6): hArg
  MOD_RES (8)..(8): hArg
  MOD_RES (9)..(9): Cha
  MOD_RES (11)..(11): Cha
  MOD_RES (14)..(14): Oic
  MOD_RES (15)..(15): Nle
  MOD_RES (16)..(16): 1-Nal
  MOD_RES (17)..(17): 4-Cl-F
XFRRLRPRASAKGXLAF

SEQ ID NO: 1541 - protein, 16 aa, Artificial Sequence
  source: /note="Description of Artificial Sequence: Synthetic peptide"
  source: /note="N-term Acetyl-NPeg11"
  MOD_RES (2)..(3): hArg
  MOD_RES (5)..(5): hArg
  MOD_RES (7)..(7): hArg
  MOD_RES (8)..(8): Cha
  MOD_RES (10)..(10): 2-Nal
  MOD_RES (13)..(13): Oic
  MOD_RES (14)..(14): Nle
  MOD_RES (15)..(15): 1-Nal
  MOD_RES (16)..(16): 4-F-F
FRRLRPRASAKGXLAF

SEQ ID NO: 1542 - protein, 17 aa, Artificial Sequence
  source: /note="Description of Artificial Sequence: Synthetic peptide"
  source: /note="N-term Acetyl-NPeg11"
  MOD_RES (1)..(1): Orn
  MOD_RES (3)..(4): hArg
  MOD_RES (6)..(6): hArg
  MOD_RES (8)..(8): hArg
  MOD_RES (9)..(9): Cha
  MOD_RES (11)..(11): 2-Nal
  MOD_RES (14)..(14): Oic
  MOD_RES (15)..(15): Nle
  MOD_RES (16)..(16): 1-Nal
  MOD_RES (17)..(17): 4-F-F
XFRRLRPRASAKGXLAF

SEQ ID NO: 1543 - protein, 16 aa, Artificial Sequence
  source: /note="Description of Artificial Sequence: Synthetic peptide"
  source: /note="N-term Acetyl-NPeg11"
  MOD_RES (2)..(3): hArg
  MOD_RES (5)..(5): hArg
  MOD_RES (7)..(7): hArg
  MOD_RES (8)..(8): Cha
  MOD_RES (13)..(13): Oic
  MOD_RES (14)..(14): Nle
  MOD_RES (16)..(16): D-Bip
FRRQRPRASHKGXLPF

SEQ ID NO: 1544 - protein, 16 aa, Artificial Sequence
  source: /note="Description of Artificial Sequence: Synthetic peptide"
  source: /note="N-term Acetyl-NPeg11"
  MOD_RES (2)..(3): hArg
  MOD_RES (5)..(5): hArg
  MOD_RES (7)..(7): hArg
  MOD_RES (8)..(8): Cha
  MOD_RES (10)..(10): 2-Nal
  MOD_RES (13)..(13): Oic
  MOD_RES (14)..(14): Nle
  MOD_RES (16)..(16): D-Bip
FRRLRPRASAKGXLPF

SEQ ID NO: 1545 - protein, 16 aa, Artificial Sequence
  source: /note="Description of Artificial Sequence: Synthetic peptide"
  source: /note="N-term Acetyl-NPeg11"
  MOD_RES (2)..(3): hArg
  MOD_RES (5)..(5): hArg
  MOD_RES (7)..(7): hArg
  MOD_RES (8)..(8): Cha
  MOD_RES (10)..(10): 2-Nal
  MOD_RES (13)..(13): Oic
  MOD_RES (14)..(14): Nle
  MOD_RES (15)..(15): 1-Nal
  MOD_RES (16)..(16): D-Bip
FRRLRPRASAKGXLAF

SEQ ID NO: 1546 - protein, 16 aa, Artificial Sequence
  source: /note="Description of Artificial Sequence: Synthetic peptide"
  source: /note="N-term Acetyl-NPeg11"
  MOD_RES (2)..(3): hArg
  MOD_RES (5)..(5): hArg
  MOD_RES (7)..(7): hArg
  MOD_RES (8)..(8): Cha
  MOD_RES (10)..(10): 2-Nal
  MOD_RES (13)..(13): Oic
  MOD_RES (14)..(14): Nle
  MOD_RES (15)..(15): 1-Nal
  MOD_RES (16)..(16): D-Bip
FRRLRPRATAKGXLAF

SEQ ID NO: 1547 - protein, 16 aa, Artificial Sequence
  source: /note="Description of Artificial Sequence: Synthetic peptide"
  source: /note="N-term Acetyl-NPeg11"
  MOD_RES (2)..(3): hArg
  MOD_RES (5)..(5): hArg
  MOD_RES (7)..(7): hArg
  MOD_RES (8)..(8): Cha
  MOD_RES (13)..(13): Oic
  MOD_RES (14)..(14): Nle
  MOD_RES (15)..(15): 1-Nal
  MOD_RES (16)..(16): D-Bip
FRRLRPRASAKGXLAF

SEQ ID NO: 1548 - protein, 17 aa, Artificial Sequence
  source: /note="Description of Artificial Sequence: Synthetic peptide"
  source: /note="N-term Acetyl-NPeg11"
  MOD_RES (1)..(1): Orn
  MOD_RES (3)..(4): hArg
  MOD_RES (6)..(6): hArg
  MOD_RES (8)..(8): hArg
  MOD_RES (9)..(9): Cha
  MOD_RES (14)..(14): Oic
  MOD_RES (15)..(15): Nle
  MOD_RES (17)..(17): D-Bip
XFRRQRPRASHKGXLPF

SEQ ID NO: 1549 - protein, 17 aa, Artificial Sequence
  source: /note="Description of Artificial Sequence: Synthetic peptide"
  source: /note="N-term Acetyl-NPeg11"
  MOD_RES (1)..(1): Orn
  MOD_RES (3)..(4): hArg
  MOD_RES (6)..(6): hArg
  MOD_RES (8)..(8): hArg
  MOD_RES (9)..(9): Cha
  MOD_RES (11)..(11): 2-Nal
  MOD_RES (14)..(14): Oic
  MOD_RES (15)..(15): Nle
  MOD_RES (17)..(17): D-Bip
XFRRLRPRASAKGXLPF

SEQ ID NO: 1550 - protein, 17 aa, Artificial Sequence
  source: /note="Description of Artificial Sequence: Synthetic peptide"
  source: /note="N-term Acetyl-NPeg11"
  MOD_RES (1)..(1): Orn
  MOD_RES (3)..(4): hArg
  MOD_RES (6)..(6): hArg
  MOD_RES (8)..(8): hArg
  MOD_RES (9)..(9): Cha
  MOD_RES (11)..(11): 2-Nal
  MOD_RES (14)..(14): Oic
  MOD_RES (15)..(15): Nle
  MOD_RES (16)..(16): 1-Nal
  MOD_RES (17)..(17): D-Bip
XFRRLRPRASAKGXLAF

SEQ ID NO: 1551 - protein, 17 aa, Artificial Sequence
  source: /note="Description of Artificial Sequence: Synthetic peptide"
  source: /note="N-term Acetyl-NPeg11"
  MOD_RES (1)..(1): Orn
  MOD_RES (3)..(4): hArg
  MOD_RES (6)..(6): hArg
  MOD_RES (8)..(8): hArg
  MOD_RES (9)..(9): Cha
  MOD_RES (11)..(11): 2-Nal
  MOD_RES (14)..(14): Oic
  MOD_RES (15)..(15): Nle
  MOD_RES (16)..(16): 1-Nal
  MOD_RES (17)..(17): D-Bip
XFRRLRPRATAKGXLAF

SEQ ID NO: 1552 - protein, 17 aa, Artificial Sequence
  source: /note="Description of Artificial Sequence: Synthetic peptide"
  source: /note="N-term Acetyl-NPeg11"
  MOD_RES (1)..(1): Orn
  MOD_RES (3)..(4): hArg
  MOD_RES (6)..(6): hArg
  MOD_RES (8)..(8): hArg
  MOD_RES (9)..(9): Cha
  MOD_RES (14)..(14): Oic
  MOD_RES (15)..(15): Nle
  MOD_RES (16)..(16): 1-Nal
  MOD_RES (17)..(17): D-Bip
XFRRLRPRASAKGXLAF

SEQ ID NO: 1553 - protein, 16 aa, Artificial Sequence
  source: /note="Description of Artificial Sequence: Synthetic peptide"
  source: /note="N-term Acetyl-NPeg11"
  MOD_RES (2)..(3): hArg
  MOD_RES (5)..(5): hArg
  MOD_RES (7)..(7): hArg
  MOD_RES (8)..(8): Cha
  MOD_RES (13)..(13): Oic
  MOD_RES (14)..(14): Nle
  MOD_RES (16)..(16): D-Bip
FRRLRPRASAKGXLPF

SEQ ID NO: 1554 - protein, 16 aa, Artificial Sequence
  source: /note="Description of Artificial Sequence: Synthetic peptide"
  source: /note="N-term Acetyl-NPeg11"
  MOD_RES (2)..(3): hArg
  MOD_RES (5)..(5): hArg
  MOD_RES (7)..(7): hArg
  MOD_RES (8)..(8): Cha
  MOD_RES (10)..(10): Cha
  MOD_RES (13)..(13): Oic
  MOD_RES (14)..(14): Nle
  MOD_RES (16)..(16): D-Bip
FRRLRPRASAKGXLPF

SEQ ID NO: 1555 - protein, 16 aa, Artificial Sequence
  source: /note="Description of Artificial Sequence: Synthetic peptide"
  source: /note="N-term Acetyl-NPeg11"
  MOD_RES (2)..(3): hArg
  MOD_RES (5)..(5): hArg
  MOD_RES (7)..(7): hArg
  MOD_RES (8)..(8): Cha
  MOD_RES (9)..(9): NMeSer
  MOD_RES (13)..(13): Oic
  MOD_RES (14)..(14): Nle
  MOD_RES (16)..(16): D-Bip
FRRLRPRASAKGXLPF

SEQ ID NO: 1556 - protein, 16 aa, Artificial Sequence
  source: /note="Description of Artificial Sequence: Synthetic peptide"
  source: /note="N-term Acetyl-NPeg11"
  MOD_RES (2)..(3): hArg
  MOD_RES (5)..(5): hArg
  MOD_RES (7)..(7): hArg
  MOD_RES (8)..(8): Cha
  MOD_RES (9)..(9): NMeSer
  MOD_RES (10)..(10): Cha
  MOD_RES (13)..(13): Oic
  MOD_RES (14)..(14): Nle
  MOD_RES (16)..(16): D-Bip
FRRLRPRASAKGXLPF

SEQ ID NO: 1557 - protein, 17 aa, Artificial Sequence
  source: /note="Description of Artificial Sequence: Synthetic peptide"
  source: /note="N-term Acetyl-NPeg11"
  MOD_RES (1)..(1): Orn
  MOD_RES (3)..(4): hArg
  MOD_RES (6)..(6): hArg
  MOD_RES (8)..(8): hArg
  MOD_RES (9)..(9): Cha
  MOD_RES (14)..(14): Oic
  MOD_RES (15)..(15): Nle
  MOD_RES (17)..(17): D-Bip
XFRRLRPRASAKGXLPF

SEQ ID NO: 1558 - protein, 17 aa, Artificial Sequence
  source: /note="Description of Artificial Sequence: Synthetic peptide"
  source: /note="N-term Acetyl-NPeg11"
  MOD_RES (1)..(1): Orn
  MOD_RES (3)..(4): hArg
  MOD_RES (6)..(6): hArg
  MOD_RES (8)..(8): hArg
  MOD_RES (9)..(9): Cha
  MOD_RES (11)..(11): Cha
  MOD_RES (14)..(14): Oic
  MOD_RES (15)..(15): Nle
  MOD_RES (17)..(17): D-Bip
XFRRLRPRASAKGXLPF

SEQ ID NO: 1559 - protein, 16 aa, Artificial Sequence
  source: /note="Description of Artificial Sequence: Synthetic peptide"
  source: /note="N-term Bromoacetyl-NPeg11"
  MOD_RES (2)..(3): hArg
  MOD_RES (5)..(5): hArg
  MOD_RES (7)..(7): hArg
  MOD_RES (8)..(8): Cha
  MOD_RES (13)..(13): Oic
  MOD_RES (14)..(14): Nle
  MOD_RES (16)..(16): 4-Cl-F
FRRQRPRASHKGXLPF

SEQ ID NO: 1560 - protein, 13 aa, Artificial Sequence
  source: /note="Description of Artificial Sequence: Synthetic peptide"
  MOD_RES (1)..(1): PyroGlu
  MOD_RES (5)..(5): Chg
  MOD_RES (12)..(12): 1-Nal
ERPRGSHKPPFAF

SEQ ID NO: 1561 - protein, 13 aa, Artificial Sequence
  source: /note="Description of Artificial Sequence: Synthetic peptide"
  source: /note="N-term may or may not be modified by an acyl group, an aryl group, an alkyl group, a PEG derivative or other serum half-life prolonging group"
  MOD_RES (1)..(1): Atz(PEG10) or any amino acid or absent
  VARIANT (2)..(2): /replace="Asn" or "Glu" or "Asp" or "Leu" or "Val" or "Ile" or "Pro" or "His" or "Trp" or "Phe" or "Tyr" or "Ala" or "1-Nal" or "2-Nal" or "Bip" or "Cha" or "Nle" or "Pra" or "MerPr" or "PyroGlu" or "Atz(PEG10)"
  VARIANT (3)..(3): /replace="Ala" or "Lys" or "Gln" or "Pra" or "MerPr" or "2Pal" or "3Pal" or "4Pal" or "Orn" or "Dpr" or "Dab" or "hArg" or "NMe-Arg" or "Cit" or "Atz(PEG10)"
  VARIANT (4)..(4): /replace="Oic" or "Tic" or "Ala" or "Arg" or "Aib" or "Gly" or "Pra" or "Atz(PEG10)"
  VARIANT (5)..(5): /replace="Lys" or "Gln" or "2Pal" or "3Pal" or "4Pal" or "Orn" or "Dpr" or "Dab" or "hArg" or "NMe-Arg" or "Cit" or "Pra" or "Leu" or "Atz(PEG10)"
  VARIANT (6)..(6): /replace="Ala" or "Phe" or "Gln" or "Ser" or "2-Nal" or "Bip" or "Cha" or "Chg" or "pI-Phe" or "Pra" or "NMeLeu"
  VARIANT (7)..(7): /replace="1-Nal" or "2-Nal" or "2Pal" or "3Pal" or "4-Cl-F" or "4-F-F" or "4-I-F" or "4-Me-F" or "Abu" or "Bip" or "Cha" or "Chg" or "Cit" or "Cpg" or "Dab" or "Dap" or "Dip" or "Nle" or "NMe-Phe" or "Nva" or "Orn" or "Atz(PEG10)" or "Pra" or
  VARIANT (7)..(7): /replace="Tic" or "Ala" or "Phe" or "Gly" or "His" or "Ile" or "Leu" or "Arg" or "Thr" or "Val" or "Trp" or "Tyr"
  VARIANT (8)..(8): /replace="1-Nal" or "2-Nal" or "2Pal" or "3Pal" or "4-Cl-F" or "4-F-F" or "4-I-F" or "Abu" or "Bip" or "Cha" or "Chg" or "Cpg" or "Dab" or "Dap" or "Dip" or "Nle" or "NMe-Phe" or "Nva" or "Orn" or "Atz(PEG10)" or "Pra" or "Tic" or "Ala" or "Phe" or
  VARIANT (8)..(8): /replace="Gly" or "D-His" or "Ile" or "Lys" or "Leu" or "Orn" or "Arg" or "Thr" or "Val" or "Trp" or "Tyr"
  VARIANT (9)..(9): /replace="1-Nal" or "2-Nal" or "2Pal" or "3Pal" or "4AmP" or "4-Cl-F" or "4-F-F" or "4-I-F" or "Bip" or "Cha" or "Chg" or "Cpg" or "Dab" or "Dap" or "Dip" or "Dpr" or "hArg" or "K(Me2)" or "LYSIPR" or "Nle" or "Nva" or "Orn" or "Pra" or "Ala" or
  VARIANT (9)..(9): /replace="Phe" or "Gly" or "His" or "Arg" or "Val" or "Trp" or "Atz(PEG10)"
  VARIANT (10)..(10): /replace="bAla" or "Hyp" or "Oic" or "Pra" or "Sar" or "Thz" or "D-Ala" or "Ala" or "Pro" or "Aib" or "Atz(PEG10)"
  VARIANT (11)..(11): /replace="Oic" or "hPro" or "Tic" or "Tiq" or "Thz" or "1-Nal" or "Pra" or "Atz(PEG10)"
  VARIANT (12)..(12): /replace="4-Cl-F" or "4-F-F" or "4-Me-F" or "Bip" or "Cha" or "Nle" or "NMeLeu" or "pI-Phe" or "Atz(PEG10)" or "Pra" or "Ala" or "Phe" or "Pro" or "Ser"
  VARIANT (13)..(13): /replace="1-Nal" or "4-Cl-F" or "4-F-F" or "4-Me-F" or "D-1Nal" or "D-Bip" or "Nle" or "NMePhe" or "Oic" or "Tic" or "D-Phe" or "Phe" or "D-Trp" or "D-Tyr" or "Gly" or "Pra" or "Atz(PEG10)" or "other aromatic amino acid"
  misc_feature (13)..(13): /note="Residues may be present in the L- or D-optical configuration"
  misc_feature (2)..(13): /note="Residues given in the sequence have no preference with respect to those in the annotations for said positions"
  source: /note="see specification as filed for detailed description of substitutions and preferred embodiments"
XQRPRLSHKGPMP

SEQ ID NO: 1562 - protein, 18 aa, Artificial Sequence
  source: /note="Description of Artificial Sequence: Synthetic peptide"
  source: /note="N-term Tetrakis"
  MOD_RES (1)..(1): Atz
  MOD_RES (8)..(8): hArg
  MOD_RES (9)..(9): Cha
  MOD_RES (14)..(14): Oic
  MOD_RES (15)..(15): Nle
  MOD_RES (17)..(17): 4-Cl-F
  source: /note="see specification as filed for detailed description of substitutions and preferred embodiments"
AKFRRQRPRASHKGXLPF
